(19) United States
(12) Patent Application Publication
(10) Pub. No.: US 2019/0062724 A1
(43) Pub. Date: Feb. 28, 2019

(54) RNA TARGETING METHODS AND COMPOSITIONS

(71) Applicant: Salk Institute for Biological Studies, La Jolla, CA (US)

(72) Inventors: Patrick D. Hsu, San Diego, CA (US); Silvana Konermann, San Diego, CA (US)

(73) Assignee: Salk Institute for Biological Studies, La Jolla, CA (US)

(21) Appl. No.: 15/937,699

(22) Filed: Mar. 27, 2018

Related U.S. Application Data
(60) Provisional application No. 62/548,846, filed on Aug. 22, 2017.
(60) Provisional application No. 62/572,963, filed on Oct. 16, 2017.
(60) Provisional application No. 62/639,178, filed on Mar. 6, 2018.

(51) Int. Cl. C12N 15/10; C12N 15/113; C12N 15/85; C12N 9/22; C12N 15/82

(52) U.S. Cl. CPC C12N 15/102; C12N 15/113; C12N 15/85; C12N 2310/3519; C12N 15/8201; C12N 2310/20; C12N 2310/16; C12N 9/22

(57) ABSTRACT

Provided herein are CRISPR/Cas methods and compositions for targeting RNA molecules, which can be used to detect, edit, or modify a target RNA.

### CROSS-REFERENCE TO RELATED APPLICATIONS

[0001] This application claims priority to U.S. Provisional Application No. 62/548,846 filed Aug. 22, 2017, U.S. Provisional Application No. 62/572,963 filed Oct. 15, 2017, and U.S. Provisional Application No. 62/639,178, filed Mar. 6, 2018, all of which are herein incorporated by reference in their entireties.

### ACKNOWLEDGMENT OF GOVERNMENT SUPPORT

[0002] This invention was made with government support under 5 DP5 OD021369-02 and 5 R21 AG056811-02 awarded by The National Institutes of Health. The government has certain rights in the invention.

### FIELD

[0003] This disclosure relates to a CRISPR/Cas system for modifying (including detecting) RNA, which utilizes novel Cas13d proteins (also referred to a CasR and nCas1) and guide RNAs.

### BACKGROUND

[0004] Mapping of transcriptome changes in cellular function and disease has been transformed by technological advances over the last two decades, from microarrays (Schena et al., 1995) to next-generation sequencing and single cell studies (Shendure et al., 2017). However, interrogating the function of individual transcript dynamics and establishing causal linkages between observed transcriptional changes and cellular phenotype requires the ability to actively control or modulate desired transcripts.

[0005] DNA engineering technologies such as CRISPR-Cas9 (Doudna and Charpentier, 2014; Hsu et al., 2014) enable researchers to dissect the function of specific genetic elements or correct disease-causing mutations. However, simple and scalable tools to study and manipulate RNA lag significantly behind their DNA counterparts. Existing RNA interference technologies, which enable cleavage or inhibition of desired transcripts, have significant off-target effects and remain challenging engineering targets due to their key role in endogenous processes (Birmingham et al., 2006; Jackson et al., 2003). As a result, methods for studying the functional role of RNAs directly have remained limited.

[0006] One of the key restrictions in RNA engineering has been the lack of RNA-binding domains that can be easily retargeted and introduced into target cells. The MS2 RNA-binding domain, for example, recognizes an invariant 21-nucleotide (nt) RNA sequence (Peabody, 1993), therefore requiring genomic modification to tag a desired transcript. Pumilio homology domains possess modular repeats with each protein module recognizing a separate RNA base, but they can only be targeted to short 8 nt RNA sequences (Cheong and Hall, 2006). While previously characterized type II (Batra et al., 2017; O'Connell et al., 2014) and VI (Abudayyeh et al., 2016; East-Seletsky et al., 2016) CRISPR-Cas systems can be reprogrammed to recognize 20-30 nt RNAs, their large size (˜1200 amino acids, aa) makes it difficult to package into AAV for primary cell and in vivo delivery.

### SUMMARY

[0007] This application provides bioinformatic analysis of prokaryotic genomes to identify sequence signatures of CRISPR-Cas repeat arrays and mine previously uncharacterized, compact Cas ribonucleases that can be used for RNA targeting tools. Engineered Type VI-D CRISPR effectors can be used to efficiently knockdown endogenous RNAs in human cells and manipulate alternative splicing, paving the way for RNA targeting applications and further effector domain fusions as part of a transcriptome engineering toolbox.

[0008] Provided herein are methods of modifying one or more target RNA molecules, such as a clustered regularly interspaced short palindromic repeats (CRISPR)-CRISPR associated (Cas) system-mediated RNA editing method. Such methods can include contacting one or more target RNA molecules with a non-naturally occurring (e.g., does not naturally occur in the cell or system into which it is introduced) or engineered CRISPR-Cas system. Such a CRISPR-Cas system can include (1) at least one Cas13d protein or at least one Cas13d nucleic acid coding sequence (such as a mRNA or a vector encoding the at least one Cas13d protein) and (2) at least one CRISPR-Cas system guide nucleic acid molecule (such as a guide RNA, gRNA) that hybridizes with the one or more target RNA molecules, or at least one nucleic acid molecule encoding the gRNA. The Cas13d protein forms a complex with the gRNA, and the gRNA directs the complex to the one or more target RNA molecules and modifies (e.g., cuts, detects) the one or more target RNA molecules. In some examples, the one or more target RNA molecules (or a cell containing the one or more target RNA molecules) are contacted with a complex including the at least one Cas13d protein and the at least one gRNA. In some examples, the system includes Mg²⁺. However, in some example, the system does not include Mg²⁺, such as if cleavage of the target RNA is not desired.

[0009] In some examples, contacting the one or more target RNA molecules with the non-naturally occurring or engineered CRISPR-Cas system includes introducing into a cell (such as a eukaryotic or prokaryotic cell) containing the one or more target RNA molecules the non-naturally occurring or engineered CRISPR-Cas system, for example using endocytosis, a liposome, a particle, an exosome, a microvesicle, a gene gun, electroporation, a virus, or combinations thereof. In some examples, contacting the one or more target RNA molecules with the non-naturally occurring or engineered CRISPR-Cas system includes contacting a cell-free system (such as a biological or environmental sample, or a cell lysate) containing the one or more target RNA molecules with the non-naturally occurring or engineered CRISPR-Cas system (for example in a diagnostic method to detect a target RNA).

[0010] In some examples, the least one Cas13d protein includes one or more HEPN domains, is no more than 150 kD, no more than 140 kD, no more than 130 kD, no more than 120 kD, such as about 90 to 120 kD, about 100 to 120 kD or about 110 kD; includes one or more mutated HEPN domains, and can process the guide RNA, but cannot cleave or cut the one or more target RNA molecules, includes an Cas13d ortholog from a prokaryotic genome or metagenome, gut metagenome, an activated sludge metagenome, an anaerobic digester metagenome, a chicken gut metagenome, a human gut metagenome, a pig gut metagenome, a bovine gut metagenome, a sheep gut metagenome, a goat gut metagenome, a capybara gut metagenome, a primate gut metagenome, a termite gut metagenome, a fecal metagenome, a genome from the Order Clostridiales, or the Family Ruminococcaceae; includes an Cas13d ortholog from Ruminococcus albus, Eubacterium siraeum, a flavefaciens strain XPD3002, Ruminococcus flavefaciens FD-1, uncultured Eubacterium sp TS28-c4095, uncultured Ruminococcus sp., Ruminococcus bicirculans, or Ruminococcus sp CAG57; includes at least 80%, at least 85%, at least 90%, at least 92%, at least 95%, at least 96%, at least 97%, at least 98%, at least 99%, or 100% sequence identity to SEQ ID NO: 1, 2, 3, 4, 5, 6, 7, 8, 9, 10, 11, 12, 13, 14, 15, 16, 17, 18, 19, 20, 21, 22, 23, 24, 25, 26, 27, 28, 29, 30, 31, 32, 33, 34, 35, 36, 37, 38, 39, 40, 41, 42, 43, 44, 45, 46, 47, 48, 49, 50, 51, 52, 53, 54, 55, 56, 57, 58, 59, 60, 61, 62, 63, 64, 65, 66, 67, 68, 69, 70, 71, 72, 73, 74, 75, 76, 77, 78, 79, 80, 81, 82, 83, 84, 85, 86, 87, 88, 89, 90, 91, 92, 93, 94, 95, 96, 97, 98, 99, 100, 101, 102, 103, 104, 105, 106, 107, 108, 109, 110, 111, 112, 113, 138, 147, 149, 153, 155, 158, 160, 162, 164, 166, 168, 170, 175, 177, 179, 181, 183, 185, 187, 189, 194, 198, 200, 202, 204, 206, 208, 210, 212, 214, 216, 218, 220, 222, 224, 226, 229, 231, 233, 235, 237, 239, 241, 243, 245, 247, 249, 251, or 253, or combinations thereof. In some examples, the least one Cas13d protein has at least 80%, at least 85%, at least 90%, at least 92%, at least 95%, at least 96%, at least 97%, at least 98%, at least 99%, or 100% sequence identity to SEQ ID NO: 1, 2, 3, 4, 5, 6, 7, 8, 9, 10, 11, 12, 13, 14, 15, 16, 17, 18, 19, 20, 21, 22, 23, 24, 25, 26, 27, 28, 29, 30, 31, 32, 33, 34, 35, 36, 37, 38, 39, 40, 41, 42, 43, 44, 45, 46, 47, 48, 49, 50, 51, 52, 53, 54, 55, 56, 57, 58, 59, 60, 61, 62, 63, 64, 65, 66, 67, 68, 69, 70, 71, 72, 73, 74, 75, 76, 77, 78, 79, 80, 81, 82, 83, 84, 85, 86, 87, 88, 89, 90, 91, 92, 93, 94, 95, 96, 97, 98, 99, 100, 101, 102, 103, 104, 105, 106, 107, 108, 109, 110, 111, 112, 113, 138, 147, 149, 153, 155, 158, 160, 162, 164, 166, 168, 170, 175, 177, 179, 181, 183, 185, 187, 189, 194, 198, 200, 202, 204, 206, 208, 210, 212, 214, 216, 218, 220, 222, 224, 226, 229, 231, 233, 235, 237, 239, 241, 243, 245, 247, 249, 251, or 253, and includes at least one motif shown in SEQ ID NO: 195, 196 or 197. In some examples, the least one Cas13d protein further includes one or more other agents (e.g., is a fusion protein), such as one or more subcellular localization signals, one or more effector domains, or combinations thereof. In some examples, the least one Cas13d protein that includes one or more HEPN domains, is no more than 1500 aa, no more than 1200 aa, no more than 1100 aa, no more than 1000 aa, such as about 800 to 1500 aa, about 800 to 1250 aa or about 850 to 950 aa.

[0011] Also provided are isolated nucleic acid molecules encoding such Cas13d proteins, such as a cDNA, genomic DNA, RNA, or mRNA. Such isolated nucleic acid molecules can be part of a vector (such as a plasmid or viral vector), and can be operably linked to a promoter. In some examples, an isolated nucleic acid molecule encoding a Cas13d protein has at least 80%, at least 85%, at least 90%, at least 92%, at least 95%, at least 96%, at least 97%, at least 98%, at least 99%, or 100% sequence identity to SEQ ID NO: 124, 125, 126, 127, 128, 139, 140 or 141. In some examples, an isolated nucleic acid molecule encoding at least one Cas13d protein (which can be part of a vector) includes at least one Cas13d protein coding sequence codon optimized for expression in a eukaryotic cell, such as human cell, for example a Cas13d coding sequence having at least 80%, at least 85%, at least 90%, at least 92%, at least 95%, at least 96%, at least 97%, at least 98%, at least 99%, or 100% sequence identity to SEQ ID NO: 114, 115, 116, 117, 118, 119, 120, 121, 122, 123, 142, 143, 144, or 145.

[0012] In some examples, the gRNA that hybridizes with the one or more target RNA molecules in an Cas13d-mediated manner includes one or more direct repeat (DR) sequences, one or more spacer sequences, such as one or more sequences comprising an array of DR-spacer-DR-spacer. In some examples, the one or more DR sequences have at least 80%, at least 85%, at least 90%, at least 92%, at least 95%, at least 96%, at least 97%, at least 98%, at least 99%, or 100% sequence identity to SEQ ID NO: 129, 130, 131, 132, 133, 134, 135, 136, 137, 148, 150, 151, 152, 154, 156, 157, 159, 161, 163, 165, 167, 169, 176, 178, 180, 182, 184, 186, 188, 190, 191, 192, 193, 199, 201, 203, 205, 207, 209, 211, 213, 215, 217, 219, 221, 223, 225, 227, 228, 230, 232, 234, 236, 238, 240, 242, 244, 246, 248, 250, 252, or 254. In one example, the gRNA includes additional sequences, such as an aptamer sequence.

[0013] In some examples, a plurality of gRNAs are generated from a single array, wherein each gRNA can be different, for example target different RNAs or target multiple regions of a single RNA, or combinations thereof.

[0014] Methods of targeting one or more target RNA molecules are provided. In some examples, an entire RNA is targeted. In some examples, a portion of an RNA is targeted. Targeting an RNA molecule can include one or more of cutting or nicking one or more target RNA molecules, activating one or more target RNA molecules, deactivating the one or more target RNA molecules, visualizing or detecting the one or more target RNA molecules, labeling the one or more target RNA molecules, binding the one or more target RNA molecules, editing the one or more target RNA molecules, trafficking the one or more target RNA molecules, and masking the one or more target RNA molecules. In some example, modifying one or more target RNA molecules includes one or more of an RNA base substitution, an RNA base deletion, an RNA base insertion, a break in the target RNA, methylating RNA, and demethylating RNA.

[0015] In some examples, such methods are used to treat a disease, such as a disease in a human. In such examples, the one or more target RNA molecules is associated with the disease

[0016] Also provided are isolated proteins, including non-naturally occurring proteins. In some examples, a protein has at least 80%, at least 85%, at least 90%, at least 92%, at least 95%, at least 96%, at least 97%, at least 98%, at least 99%, or 100% sequence identity to SEQ ID NO: 1, 2, 3, 4, 5, 6, 7, 8, 9, 10, 11, 12, 13, 14, 15, 16, 17, 18, 19, 20, 21, 22, 23, 24, 25, 26, 27, 28, 29, 30, 31, 32, 33, 34, 35, 36, 37, 38, 39, 40, 41, 42, 43, 44, 45, 46, 47, 48, 49, 50, 51, 52, 53, 54, 55, 56, 57, 58, 59, 60, 61, 62, 63, 64, 65, 66, 67, 68, 69, 70, 71, 72, 73, 74, 75, 76, 77, 78, 79, 80, 81, 82, 83, 84, 85, 86, 87, 88, 89, 90, 91, 92, 93, 94, 95, 96, 97, 98, 99, 100, 101, 102, 103, 104, 105, 106, 107, 108, 109, 110, 111, 112, or 113. In some examples, an isolated protein is an Cas13d ortholog from a prokaryotic genome or metagenome, gut metagenome, an activated sludge metagenome, an anaerobic digester metagenome, a chicken gut metagenome, a human gut metagenome, a pig gut metagenome, a bovine gut metagenome, a sheep gut metagenome, a goat gut metagenome, a capybara gut metagenome, a primate gut metagenome, a termite gut metagenome, a fecal metagenome, a genome from the Order Clostridiales, or the Family Ruminococcaceae. In some examples, an Cas13d ortholog includes an Cas13d ortholog from Ruminococcus albus, Eubacterium siraeum, a Ruminococcus flavefaciens strain XPD3002, Ruminococcus flavefaciens FD-1, uncultured Eubacterium sp TS28-c4095, uncultured Ruminococcus sp., Ruminococcus bicirculans, or Ruminococcus sp CAG57. The protein is an Cas13d protein that further includes one or more other agents or domains (e.g., is a fusion protein), such as one or more subcellular localization signals, one or more effector domains, or combinations thereof.

[0017] Also provided are isolated guide RNA (gRNA) molecules. In some examples, an isolated gRNA includes one or more direct repeat (DR) sequences, such as an unprocessed (e.g., about 36 nt) or processed DR (e.g., about 30 nt). In some examples a DR has at least 80%, at least 85%, at least 90%, at least 92%, at least 95%, at least 96%, at least 97%, at least 98%, at least 99%, or 100% sequence identity to SEQ ID NO: 129, 130, 131, 132, 133, 134, 135, 136, 137, 148, 150, 151, 152, 154, 156, 157, 159, 161, 163, 165, 167, 169, 176, 178, 180, 182, 184, 186, 188, 190, 191, 192, 193, 199, 201, 203, 205, 207, 209, 211, 213, 215, 217, 219, 221, 223, 225, 227, 228, 230, 232, 234, 236, 238, 240, 242, 244, 246, 248, 250, 252, or 254. Such a gRNA can further include one or more spacer sequences specific for (e.g., is complementary to) the target RNA.

[0018] Also provided are ribonucleoprotein (RNP) complexes, which include an Cas13d protein provided herein and a gRNA provided herein.

[0019] Also provided are recombinant cells that include any Cas13d protein (or nucleic acid molecule encoding Cas13d), any gRNA, any RNP complex, or any vector, provided herein. In one example, the cell is not a bacterial cell. In one example, the cell is a bacterial cell.

[0020] Also provided are compositions that include one or more of any Cas13d protein (or nucleic acid molecule encoding Cas13d), any gRNA, any RNP complex, any isolated nucleic acid molecule, any vector, or any cell, provided herein. Such compositions can include a pharmaceutically acceptable carrier.

[0021] Also provided are kits. Such kits can include one or more of any Cas13d protein (or nucleic acid molecule encoding Cas13d), any gRNA, any RNP complex, any isolated nucleic acid molecule, any vector, any cell, or any composition provided herein. Such reagents can be combined or in separate containers.

[0022] The foregoing and other objects and features of the disclosure will become more apparent from the following detailed description, which proceeds with reference to the accompanying figures.

### BRIEF DESCRIPTION OF THE DRAWINGS

[0023] FIGS. 1A-1B: Bioinformatic pipeline for the identification of the RNA-targeting class 2 CRISPR system Cas13d. (A) Schematic describing a computational pipeline for CRISPR system identification. A minimal definition for a putative class 2 CRISPR locus was used, requiring only a CRISPR repeat array and a nearby protein >750 aa in length. The initial search was performed on prokaryotic genome assemblies derived from NCBI Genome, and later expanded via TBLASTN of predicted Cas13d proteins against public metagenome sequences without predicted open reading frames. DR, direct repeat. (B) Phylogenetic classification and alignment of full-length Cas13d effectors and metagenomic fragments. Cas13d effectors and metagenomic Cas13d protein fragments cluster into several distinct branches, which are colored for ease of interpretation. Shading indicates residue conservation using the Blosum62 matrix. Full-length Cas13d effectors used in this study were sampled from distinct branches of the Cas13d family. Alignment of Cas13d proteins and protein fragments was performed using ClustalOmega 1.2.4 and maximum-likelihood tree building was performed with PhyML 3.2.

[0024] FIGS. 2A-2D: Type VI CRISPR-Cas13d is a family of single effector CRISPR ribonucleases. (A) Maximum-likelihood phylogenetic tree of Cas13d effectors used herein, with the full Cas13d CRISPR locus depicted along with conserved HEPN RNase domains. Grey rectangles denote CRISPR direct repeats (DRs) and blue diamonds indicate spacer sequences. (B) RNA sequencing of a heterologously expressed Cas13d locus from an uncultured Ruminococcus sp. sample. Mature gRNAs mapping to the CRISPR array indicate a processed 30 nt DR and a variable spacer length from 14-26 nt. Co-fold analysis of direct repeat truncation indicates a strong hairpin structure. (C) Purified E. siraeum Cas13d and catalytically dead Cas13d (dCas13d) protein are each sufficient to process a guide array into its two component gRNAs. Addition of EDTA does not impair gRNA processing. ‘d’, dCas13d(R295A, H300A, R849A, H854A).

[0025] FIGS. 3A-3D. Phylogenetic classification of RNA-targeting class 2 CRISPR effectors and sequence conservation within the Cas13d family. (A) HEPN motif conservation in Cas13d effectors used herein with conserved residues shaded according to Blosum62. The RxxxxH HEPN motif is highlighted. (B) Maximum-likelihood tree of type VI CRISPR-Cas families. Average amino acid lengths of Type VI Cas13 superfamily effectors are indicated in red. Alignment of previously described class 2 CRISPR RNA-targeting proteins (Abudayyeh et al., 2017; Cox et al., 2017; East-Seletsky et al., 2017; East-Seletsky et al., 2016; Smargon et al., 2017) and Cas13d effectors was performed using MAFFT 7.38 and maximum-likelihood tree building was performed with PhyML 3.2. Branch labels and scale bar indicate substitutions per site. (C) Predicted Cas13d direct repeat RNA secondary structure. (D) Sequence logo of full length 36 nt Cas13d direct repeats.

[0026] FIGS. 4A-4C: Purification of recombinant Cas13d protein. EsCas13d was expressed as N-terminal His-MBP fusion and purified by successive affinity, cation exchange, and size exclusion chromatography. The His-tag was removed by TEV protease cleavage. (A) Chromatogram from Superdex 200 column for EsCas13d. (B) SDS-PAGE gel of size exclusion chromatography fractions for E. siraeum Cas13d. (C) SDS-PAGE gel of purified E. siraeum Cas13d and dCas13d (R295A, H300A, R849A, H854A mutations of predicted catalytic residues in both HEPN motifs).

[0027] FIGS. 5A-5D: Programmable RNA targeting by Cas13d in vitro. (A) E. siraeum Cas13d requires a matching guide array or mature gRNA to efficiently cleave complementary ssRNA targets. Denaturing gel depicts cleavage reactions incubated at 37° C. for 1 hour. NT, non-targeting. (B) Substitution with dCas13d or addition of EDTA abrogate Cas13d-mediated RNA targeting with both the guide and array. ‘d’, dead Cas13d. (C) Denaturing gel depicting guide-target match dependent activation of Cas13d cleavage activity. Scrambled target RNA (‘A’) is fluorescently labeled, while guide-complementary activator target RNA (‘B’) is unlabeled. RNA cleavage activity is abolished by the individual removal of guide RNA or complementary target RNA, as well as the addition of EDTA or the catalytic inactivation of Cas13d (indicated as ‘d’). (D) A model for guide and target-dependent activation of Cas13d RNase activity. The ternary Cas13d:gRNA:target RNA complex is capable of cleaving the complementary target RNA or bystander RNAs.

[0028] FIGS. 6A-6H. In vitro characterization of Cas13d properties. (A) Schematic showing the length and sequence of gRNA spacer truncations and spacer position relative to the complementary ssRNA target. (B) Denaturing gel depicting EsCas13d cleavage activity of target RNA with different spacer lengths. (C) Denaturing gel depicting EsCas13d cleavage reactions paired with 12 guides from FIG. 3A tiling a complementary ssDNA version of the ssRNA target. (D) Denaturing gel depicting cleavage reactions using EsCas13d paired with the same 12 guides tiling a dsDNA version of the complementary target. (E) Quantification of cleavage efficiency from FIG. 3A. Each PFS base is the average of 3 different spacer sequences tiling a complementary target RNA. Cleavage percentage is determined by the ratio of cleaved band intensity divided by total lane intensity. Mean is depicted±SD with each data point representing an independent replicate. (F) Cas13d-mediated cleavage of target RNA carrying different PFS bases given an invariant spacer sequence. Quantification of Cas13d cleavage efficiency and a representative denaturing gel depicting EsCas13d cleavage activity are shown. Differences are not significant (one-way ANOVA, P=0.768). Cleavage percentage is determined as above, and mean is depicted±SD with n=3. (G) and (H) Optimal temperature range for Cas13d activity. Denaturing gels depicting EsCas13d cleavage activity at temperatures ranging from 16-62° C. for two different target RNAs.

[0029] FIGS. 7A-7B: Characterization of Cas13d target substrate preference. (A) Cas13d can be generalizably reprogrammed with multiple guides and does not exhibit a protospacer flanking sequence (PFS) requirement. RNA cleavage by EsCas13d and 12 guides tiling the target RNA is shown. Control lanes are from a separate gel run in parallel. (B) Cas13d preferentially cleaves uracil bases in the loop of a hairpin or a linear homopolymer repeat, which is interrupted every 5 nt by a transition mutation (X) to enable synthesis.

[0030] FIGS. 8A-8D: RNA knockdown activity screen of engineered Cas13d orthologs in human cells. (A) Schematic for mammalian expression constructs encoding for engineered Cas13d effectors and guides. NLS, nuclear localization signal. pre-gRNA, artificial unprocessed guide RNA containing a single 30 nt spacer sequence flanked by 2 full length 36 nt DRs. gRNA, predicted mature guide RNA with a single 30 nt processed DR and 22 nt spacer sequence (B) Heatmap of mCherry protein knockdown in a Cas13d ortholog activity screen in human HEK 293FT cells using pools of 4 pre-gRNAs or gRNAs. Normalized MFI, median fluorescent intensity relative to non-targeting condition. Positions in gray were not tested, with n=3. (C) Immunocytochemistry of Cas13d showing localization and expression of engineered constructs. Scale bar, 10 μm. Blue pseudocolor, DAPI staining of nuclei. (D) Comparison of Adm and Rfx Cas13d ortholog constructs for knockdown of endogenous B4GALNT1 mRNA reveals RfxCas13d-NLS (CasRx) to be most effective for both guide RNA architectures. Pools of 4 guides were used for targeting. NT, non-targeting. Values are mean±SEM with n=3.

[0031] FIGS. 9A-9H: CasRx mediates efficient and specific knockdown of diverse human coding and noncoding transcripts. (A) Multiple guide RNAs tiling a target transcript can be expressed as a single array and processed by RfxCas13d-NLS (CasRx) into individual gRNAs within the same cell. (B) Arrays of 4 guides each mediate target knockdown by CasRx in 293FT cells via transient transfection. Knockdown relative to GFP vehicle control was determined by qPCR, with n=3. (C) Schematic of CasRx target sequences and spacer position-matched shRNAs. (D) Relative target RNA knockdown by individual position-matched shRNAs and CasRx gRNAs. NT, non-targeting. CRISPRi, dCas9-mediated CRISPR interference for transcriptional repression (n=3) (E) Volcano plot of differential transcript levels between B4GALNT1 targeting and non-targeting (NT) shRNAs as determined by RNA sequencing (n=3). 542 non-specific transcript changes were identified. (F) Volcano plot of differential transcript levels between B4GALNT1-targeting CasRx and non-targeting (NT) guide. Targeting guide position is matched to the shRNA shown in (E). B4GALNT1 was the only transcript exhibiting a significant change, with n=3. (G) Summary of significant off-target transcript perturbations by matched shRNAs and CasRx guides. (H) CasRx targeting of 11 endogenous transcripts, each with 3 guides and a non-targeting (NT) guide in 293FT cells. Transcript levels are relative to GFP vehicle control, mean±SEM with n=3.

[0032] FIGS. 10A-10D. Comparison of engineered Cas13 superfamily effectors for targeted knockdown and splicing. (A) Relative target RNA knockdown by individual position-matched gRNAs for CasRx, NLS-LwaCas13a-msfGFP (Abudayyeh et al., 2017) and PspCas13b-NES (Cox et al., 2017) in HEK 293FT cells. NT, non-targeting. Values are mean±SEM with n=3. (B) Comparison of Cas13 median knockdown efficiencies. n=3 per guide RNA. **** indicates P<0.0001 according to Friedman's test. (C) Exon exclusion by catalytically inactive NLS-dCas13a-msfGFP on the bichromatic splicing reporter. Guides are position-matched to those reported in FIG. 6B for CasRx. Values are mean±SEM with n=3. (D) Comparison of splicing modulation by NLS-dCas13a-msfGFP and CasRx. Fold change in targeted exon exclusion relative to non-targeting guide is shown. **** indicates P<0.0001 according to two-way ANOVA.

[0033] FIGS. 11A-11B. RNA sequencing from CasRx and shRNA targeting of ANXA4 in human cells. (A) Volcano plots of differential transcript levels between ANXA4 targeting and non-targeting (NT) shRNAs as determined by RNA sequencing (n=3). 915 non-specific transcript changes were identified. (B) Volcano plot of differential transcript levels for an ANXA4 targeting CasRx array used in FIG. 9B containing a guide position matched to the shRNA shown in (A) and a non-targeting (NT) array. ANXA4 was the only transcript exhibiting significant downregulation with n=3. HIST2HBE was the only transcript identified to exhibit significant upregulation. H2B is a dimer partner of H2AX (Du et al., 2006) which has been shown to interact with ANXA4 (Yang et al., 2010).

[0034] FIGS. 12A-12F: AAV delivery of catalytically inactive dCasRx splice effectors to manipulate alternative splicing. (A) Schematic of bichromatic exon skipping reporter. +1 and +3, reading frame. BP, intronic branch point-targeting guide. SA, splice acceptor site-overlapping guide. EX, exonic guide. SD, splice donor site-overlapping guide. AUG, start codon. UGA, stop codon. Inclusion of the second exon leads to an out-of-frame (+3), non-fluorescent translation of dsRed followed by in-frame mTagBFP2. Exclusion of the targeted exon leads to an in frame translation of dsRed (+1) followed by a stop codon. (B) Induced exon exclusion by dCasRx and an N-terminal hnRNPa1-dCasRx fusion protein targeted to pre-mRNA. The Gly-rich C-terminal domain of hnRNPa1 is used as the effector domain. Exon skipping efficiency is depicted as a relative percentage of cells carrying primarily the dsRed or BFP isoform, determined through flow cytometry. NLS, nuclear localization signal. ‘A’, CRISPR array carrying all 4 guides. Values are mean±SEM with n=3. (C) AAV design carrying dCasRx and a three-guide array with total transgene size <4.3 kb, including AAV inverted terminal repeats (ITRs). (D) Schematic of frontotemporal dementia (FTD) disease modeling. Neurons are generated via Neurogenin-2 (Ngn2) directed differentiation of patient-derived and control iPSCs followed by transduction with dCasRx or vehicle control AAV (EFS-mTagBFP2). (E) FTD is associated with SNPs in a putative intronic splice enhancer following exon 10 of the MAPT transcript encoding for tau. Alternative splicing of MAPT exon 10 results in 4R tau (by inclusion) and 3R tau (by exclusion). SNPs in the intronic splice enhancer including the indicated IVS 10+16 mutation result in increased exon inclusion and higher levels of 4R tau. To facilitate reduction of 4R tau levels, gRNAs contained in a dCasRx array were targeted to the exon 10 splice acceptor (g1) as well as two putative exonic splice enhancers indicated in purple (g2, g3). (F) Relative 4R/3R tau transcript ratios in differentiated neurons were assayed via qPCR at 14 days following transduction with AAV. FTD, frontotemporal dementia cells carrying IVS 10+16. Values are mean±S.D. with n=3. **** indicates P<0.0001.

[0035] FIG. 13 is a bar graph showing RNA targeting in human cells using the disclosed methods.

[0036] FIG. 14 is a schematic drawing showing how the disclosed Cas13d and DRs can be used to achieve alternative splicing.

[0037] FIGS. 15A-15D are a series of panels showing: (A) Cas13d is converted into an active RNase complex upon binding a target matching the spacer sequence of the guide RNA. It is capable of cleaving gRNA-complementary target RNA or non-complementary bystander RNAs. (B) Cas13d target-dependent RNase activity can be converted into a detectable signal, for example through cleavage of a labeled detector RNA that is cleaved only in the presence of a target matching the spacer of the Cas13d guide RNA. In this example, the detector RNA contains a fluorophore, ‘F’, and a quencher ‘Q’, that abolishes fluorescence. Only upon bystander RNA cleavage is the fluorophore liberated from the quencher and fluorescence is generated. (C) Cas13d from E. siraeum produces a visible signal only in the presence of a perfectly matched target and not in the presence of different mismatched targets. (D) Cas13d from R. flavefaciens strain XPD3002 produces a visible signal only in the presence of a perfectly matched target and not in the presence of different mismatched targets.

[0038] FIGS. 16A-16B: (A) Alignment of 7 orthologs shows regions with high (green bars) and low (red bars) conservation. Regions selected for deletion are marked 1-10. (B) knock-down (top) and splicing (bottom) activity of full-length CasRx and CasRx deletion variants. Deletion variant 5 is shown to retain full activity, demonstrating the feasibility of deleting areas of low conservation while retaining full activity.

[0039] FIGS. 17A and 17B show targeting of ccdB in bacterial cells. (A) construct introduced into bacterial cells expressing ccdB, and (B) relative expression of ccdB under various conditions.

[0040] FIGS. 18A-18MMM show an alignment of 53 different Cas13d proteins (SEQ ID NOs: N/A, 183, 189, 220, 218, 222, 229, 216, 177, 200, 139, 179, 208, 166, 185, 202, 239, 239, ?, 249, 210, 243, 212, 175, 164, 160, N/A, N/A, 187, 241, 140, 162, 155, 206, 181, 231, N/A, 198, 237, 233, 253, 214, 224, 127, 235, 153, 125, 245, 247, 204, 226, 3, 126, and 149, from top to bottom).

### SEQUENCE LISTING

[0041] The nucleic and amino acid sequences listed in the accompanying sequence listing are shown using standard letter abbreviations for nucleotide bases, and three letter code for amino acids, as defined in 37 C.F.R. 1.822. Only one strand of each nucleic acid sequence is shown, but the complementary strand is understood as included by any reference to the displayed strand. The Sequence Listing is submitted as an ASCII text file, created on Mar. 27, 2018, 883 KB, which is incorporated by reference herein. In the accompanying sequence listing: SEQ ID NO: 1 is an exemplary Cas13d sequence from Eubacterium siraeum containing a HEPN site.

[0042] SEQ ID NO: 2 is an exemplary Cas13d sequence from Eubacterium siraeum containing a mutated HEPN site.

[0043] SEQ ID NO: 3 is an exemplary Cas13d sequence from uncultured Ruminococcus sp. containing a HEPN site.

[0044] SEQ ID NO: 4 is an exemplary Cas13d sequence from uncultured Ruminococcus sp. containing a mutated HEPN site.

[0045] SEQ ID NO: 5 is an exemplary Cas13d sequence from Gut_metagenome_contig2791000549.

[0046] SEQ ID NO: 6 is an exemplary Cas13d sequence from Gut_metagenome_contig855000317.

[0047] SEQ ID NO: 7 is an exemplary Cas13d sequence from Gut_metagenome_contig3389000027.

[0048] SEQ ID NO: 8 is an exemplary Cas13d sequence from Gut_metagenome_contig8061000170.

[0049] SEQ ID NO: 9 is an exemplary Cas13d sequence from Gut_metagenome_contig1509000299.

[0050] SEQ ID NO: 10 is an exemplary Cas13d sequence from Gut_metagenome_contig9549000591.

[0051] SEQ ID NO: 11 is an exemplary Cas13d sequence from Gut_metagenome_contig71000500.

[0052] SEQ ID NO: 12 is an exemplary Cas13d sequence from human gut metagenome.

[0053] SEQ ID NO: 13 is an exemplary Cas13d sequence from Gut_metagenome_contig3915000357.

[0054] SEQ ID NO: 14 is an exemplary Cas13d sequence from Gut_metagenome_contig4719000173.

[0055] SEQ ID NO: 15 is an exemplary Cas13d sequence from Gut_metagenome_contig6929000468.

[0056] SEQ ID NO: 16 is an exemplary Cas13d sequence from Gut_metagenome_contig7367000486.

[0057] SEQ ID NO: 17 is an exemplary Cas13d sequence from Gut_metagenome_contig7930000403.

[0058] SEQ ID NO: 18 is an exemplary Cas13d sequence from Gut_metagenome_contig993000527.

[0059] SEQ ID NO: 19 is an exemplary Cas13d sequence from Gut_metagenome_contig6552000639.

[0060] SEQ ID NO: 20 is an exemplary Cas13d sequence from Gut_metagenome_contig11932000246.

[0061] SEQ ID NO: 21 is an exemplary Cas13d sequence from Gut_metagenome_contig12963000286.

[0062] SEQ ID NO: 22 is an exemplary Cas13d sequence from Gut_metagenome_contig2952000470.

[0063] SEQ ID NO: 23 is an exemplary Cas13d sequence from Gut_metagenome_contig451000394.

[0064] SEQ ID NO: 24 is an exemplary Cas13d sequence from Eubacterium_siraeum_DSM_15702.

[0065] SEQ ID NO: 25 is an exemplary Cas13d sequence from gut_metagenome_P19E0k2120140920,_c369000003.

[0066] SEQ ID NO: 26 is an exemplary Cas13d sequence from Gut_metagenome_contig7593000362.

[0067] SEQ ID NO: 27 is an exemplary Cas13d sequence from Gut_metagenome_contig12619000055.

[0068] SEQ ID NO: 28 is an exemplary Cas13d sequence from Gut_metagenome_contig1405000151.

[0069] SEQ ID NO: 29 is an exemplary Cas13d sequence from Chicken_gut_metagenome_c298474.

[0070] SEQ ID NO: 30 is an exemplary Cas13d sequence from Gut_metagenome_contig1516000227.

[0071] SEQ ID NO: 31 is an exemplary Cas13d sequence from Gut_metagenome_contig1838000319.

[0072] SEQ ID NO: 32 is an exemplary Cas13d sequence from Gut_metagenome_contig13123000268.

[0073] SEQ ID NO: 33 is an exemplary Cas13d sequence from Gut_metagenome_contig5294000434.

[0074] SEQ ID NO: 34 is an exemplary Cas13d sequence from Gut_metagenome_contig6415000192.

[0075] SEQ ID NO: 35 is an exemplary Cas13d sequence from Gut_metagenome_contig6144000300.

[0076] SEQ ID NO: 36 is an exemplary Cas13d sequence from Gut_metagenome_contig9118000041.

[0077] SEQ ID NO: 37 is an exemplary Cas13d sequence from Activated_sludge_metagenome_transcript_24486.

[0078] SEQ ID NO: 38 is an exemplary Cas13d sequence from Gut_metagenome_contig1322000437.

[0079] SEQ ID NO: 39 is an exemplary Cas13d sequence from Gut_metagenome_contig4582000531.

[0080] SEQ ID NO: 40 is an exemplary Cas13d sequence from Gut_metagenome_contig9190000283.

[0081] SEQ ID NO: 41 is an exemplary Cas13d sequence from Gut_metagenome_contig1709000510.

[0082] SEQ ID NO: 42 is an exemplary Cas13d sequence from M24_(LSQX01212483_Anaerobic_digester_metagenome) with a HEPN domain.

[0083] SEQ ID NO: 43 is an exemplary Cas13d sequence from Gut_metagenome_contig3833000494.

[0084] SEQ ID NO: 44 is an exemplary Cas13d sequence from Activated_sludge_metagenome_transcript_17355.

[0085] SEQ ID NO: 45 is an exemplary Cas13d sequence from Gut_metagenome_contig11061000330.

[0086] SEQ ID NO: 46 is an exemplary Cas13d sequence from Gut_metagenome_contig338000322 from sheep gut metagenome.

[0087] SEQ ID NO: 47 is an exemplary Cas13d sequence from human gut metagenome.

[0088] SEQ ID NO: 48 is an exemplary Cas13d sequence from Gut_metagenome_contig9530000097.

[0089] SEQ ID NO: 49 is an exemplary Cas13d sequence from Gut_metagenome_contig1750000258.

[0090] SEQ ID NO: 50 is an exemplary Cas13d sequence from Gut_metagenome_contig5377000274.

[0091] SEQ ID NO: 51 is an exemplary Cas13d sequence from gut_metagenome_P19E0k2120140920_c248000089.

[0092] SEQ ID NO: 52 is an exemplary Cas13d sequence from Gut_metagenome_contig11400000031.

[0093] SEQ ID NO: 53 is an exemplary Cas13d sequence from Gut_metagenome_contig7940000191.

[0094] SEQ ID NO: 54 is an exemplary Cas13d sequence from Gut_metagenome_contig6049000251.

[0095] SEQ ID NO: 55 is an exemplary Cas13d sequence from Gut_metagenome_contig1137000500.

[0096] SEQ ID NO: 56 is an exemplary Cas13d sequence from Gut_metagenome_contig9368000105.

[0097] SEQ ID NO: 57 is an exemplary Cas13d sequence from Gut_metagenome_contig546000275.

[0098] SEQ ID NO: 58 is an exemplary Cas13d sequence from Gut_metagenome_contig7216000573.

[0099] SEQ ID NO: 59 is an exemplary Cas13d sequence from Gut_metagenome_contig4806000409.

[0100] SEQ ID NO: 60 is an exemplary Cas13d sequence from Gut_metagenome_contig110762000480.

[0101] SEQ ID NO: 61 is an exemplary Cas13d sequence from Gut_metagenome_contig4114000374.

[0102] SEQ ID NO: 62 is an exemplary Cas13d sequence from Ruminococcus_flavefaciens_FD1.

[0103] SEQ ID NO: 63 is an exemplary Cas13d sequence from Gut_metagenome_contig7093000170.

[0104] SEQ ID NO: 64 is an exemplary Cas13d sequence from Gut_metagenome_contig11113000384.

[0105] SEQ ID NO: 65 is an exemplary Cas13d sequence from Gut_metagenome_contig6403000259.

[0106] SEQ ID NO: 66 is an exemplary Cas13d sequence from Gut_metagenome_contig6193000124.

[0107] SEQ ID NO: 67 is an exemplary Cas13d sequence from Gut_metagenome_contig721000619.

[0108] SEQ ID NO: 68 is an exemplary Cas13d sequence from Gut_metagenome_contig1666000270.

[0109] SEQ ID NO: 69 is an exemplary Cas13d sequence from Gut_metagenome_contig2002000411.

[0110] SEQ ID NO: 70 is an exemplary Cas13d sequence from Ruminococcus_albus.

[0111] SEQ ID NO: 71 is an exemplary Cas13d sequence from Gut_metagenome_contig13552000311.

[0112] SEQ ID NO: 72 is an exemplary Cas13d sequence from Gut_metagenome_contig10037000527.

[0113] SEQ ID NO: 73 is an exemplary Cas13d sequence from Gut_metagenome_contig238000329.

[0114] SEQ ID NO: 74 is an exemplary Cas13d sequence from Gut_metagenome_contig2643000492.

[0115] SEQ ID NO: 75 is an exemplary Cas13d sequence from Gut_metagenome_contig874000057.

[0116] SEQ ID NO: 76 is an exemplary Cas13d sequence from Gut_metagenome_contig4781000489.

[0117] SEQ ID NO: 77 is an exemplary Cas13d sequence from Gut_metagenome_contig12144000352.

[0118] SEQ ID NO: 78 is an exemplary Cas13d sequence from Gut_metagenome_contig5590000448.

[0119] SEQ ID NO: 79 is an exemplary Cas13d sequence from Gut_metagenome_contig92690000031.

[0120] SEQ ID NO: 80 is an exemplary Cas13d sequence from Gut_metagenome_contig8537000520.

[0121] SEQ ID NO: 81 is an exemplary Cas13d sequence from Gut_metagenome_contig1845000130.

[0122] SEQ ID NO: 82 is an exemplary Cas13d sequence from gut_metagenome_P13E0k2120140920_c3000072.

[0123] SEQ ID NO: 83 is an exemplary Cas13d sequence from gut_metagenome_P1E0k2120140920_c1000078.

[0124] SEQ ID NO: 84 is an exemplary Cas13d sequence from Gut_metagenome_contig12990000099.

[0125] SEQ ID NO: 85 is an exemplary Cas13d sequence from Gut_metagenome_contig525000349.

[0126] SEQ ID NO: 86 is an exemplary Cas13d sequence from Gut_metagenome_contig7229000302.

[0127] SEQ ID NO: 87 is an exemplary Cas13d sequence from Gut_metagenome_contig3227000343.

[0128] SEQ ID NO: 88 is an exemplary Cas13d sequence from Gut_metagenome_contig7030000469.

[0129] SEQ ID NO: 89 is an exemplary Cas13d sequence from Gut_metagenome_contig5149000068.

[0130] SEQ ID NO: 90 is an exemplary Cas13d sequence from Gut_metagenome_contig400200045.

[0131] SEQ ID NO: 91 is an exemplary Cas13d sequence from Gut_metagenome_contig10420000446.

[0132] SEQ ID NO: 92 is an exemplary Cas13d sequence from new_flavefaciens,_strain_XPD3002.

[0133] SEQ ID NO: 93 is an exemplary Cas13d sequence from M26_Gut_metagenome_contig698000307.

[0134] SEQ ID NO: 94 is an exemplary Cas13d sequence from M36_Uncultured_Eubacterium_sp_TS28_c40956.

[0135] SEQ ID NO: 95 is an exemplary Cas13d sequence from M12_gut_metagenome_P25COk2120140920_c134000066.

[0136] SEQ ID NO: 96 is an exemplary Cas13d sequence from human gut metagenome.

[0137] SEQ ID NO: 97 is an exemplary Cas13d sequence from M10_gut_metagenome_P25C90k2120140920,_c28000041.

[0138] SEQ ID NO: 98 is an exemplary Cas13d sequence from M11_gut_metagenome_P25C7k2120140920_c4078000105.

[0139] SEQ ID NO: 99 is an exemplary Cas13d sequence from gut_metagenome_P25C0k2120140920_c32000045.

[0140] SEQ ID NO: 100 is an exemplary Cas13d sequence from M13_gut_metagenome_P23C7k2120140920_c3000067.

[0141] SEQ ID NO: 101 is an exemplary Cas13d sequence from M5_gut_metagenome_P18E90k2120140920.

[0142] SEQ ID NO: 102 is an exemplary Cas13d sequence from M21_gut_metagenome_P18E0k2120140920.

[0143] SEQ ID NO: 103 is an exemplary Cas13d sequence from M7_gut_metagenome_P38C7k2120140920_c4841000003.

[0144] SEQ ID NO: 104 is an exemplary Cas13d sequence from Ruminococcus_bicirculans.

[0145] SEQ ID NO: 105 is an exemplary Cas13d sequence.

[0146] SEQ ID NO: 106 is an exemplary Cas13d consensus sequence.

[0147] SEQ ID NO: 107 is an exemplary Cas13d sequence from M18_gut_metagenome_P22E0k2120140920_c3395000078.

[0148] SEQ ID NO: 108 is an exemplary Cas13d sequence from M17_gut_metagenome_P22E90k2120140920_c114.

[0149] SEQ ID NO: 109 is an exemplary Cas13d sequence from Ruminococcus_sp_CAG57.

[0150] SEQ ID NO: 110 is an exemplary Cas13d sequence from gut_metagenome_P11E90k2120140920_c43000123.

[0151] SEQ ID NO: 111 is an exemplary Cas13d sequence from M6_gut_metagenome_P13E90k2120140920_c7000009.

[0152] SEQ ID NO: 112 is an exemplary Cas13d sequence from M19_gut_metagenome_P17E90k2120140920.

[0153] SEQ ID NO: 113 is an exemplary Cas13d sequence from gut_metagenome_P17E0k2120140920,_c87000043.

[0154] SEQ ID NO: 114 is an exemplary human codon optimized Eubacterium siraeum Cas13d nucleic acid sequence.

[0155] SEQ ID NO: 115 is an exemplary human codon optimized Eubacterium siraeum Cas13d nucleic acid sequence with a mutant HEPN domain.

[0156] SEQ ID NO: 116 is an exemplary human codon-optimized Eubacterium siraeum Cas13d nucleic acid sequence with N-terminal NLS.

[0157] SEQ ID NO: 117 is an exemplary human codon-optimized Eubacterium siraeum Cas13d nucleic acid sequence with N- and C-terminal NLS tags.

[0158] SEQ ID NO: 118 is an exemplary human codon-optimized uncultured Ruminococcus sp. Cas13d nucleic acid sequence.

[0159] SEQ ID NO: 119 is an exemplary human codon-optimized uncultured Ruminococcus sp. Cas13d nucleic acid sequence with a mutant HEPN domain.

[0160] SEQ ID NO: 120 is an exemplary human codon-optimized uncultured Ruminococcus sp. Cas13d nucleic acid sequence with N-terminal NLS.

[0161] SEQ ID NO: 121 is an exemplary human codon-optimized uncultured Ruminococcus sp. Cas13d nucleic acid sequence with N- and C-terminal NLS tags.

[0162] SEQ ID NO: 122 is an exemplary human codon-optimized uncultured Ruminococcus flavefaciens FD1 Cas13d nucleic acid sequence.

[0163] SEQ ID NO: 123 is an exemplary human codon-optimized uncultured Ruminococcus flavefaciens FD1 Cas13d nucleic acid sequence with mutated HEPN domain.

[0164] SEQ ID NO: 124 is an exemplary Cas13d nucleic acid sequence from Ruminococcus bicirculans.

[0165] SEQ ID NO: 125 is an exemplary Cas13d nucleic acid sequence from Eubacterium siraeum.

[0166] SEQ ID NO: 126 is an exemplary Cas13d nucleic acid sequence from Ruminococcus flavefaciens FD1.

[0167] SEQ ID NO: 127 is an exemplary Cas13d nucleic acid sequence from Ruminococcus albus.

[0168] SEQ ID NO: 128 is an exemplary Cas13d nucleic acid sequence from Ruminococcus flavefaciens XPD.

[0169] SEQ ID NO: 129 is an exemplary consensus DR nucleic acid sequence for E. siraeum Cas13d.

[0170] SEQ ID NO: 130 is an exemplary consensus DR nucleic acid sequence for Rum. Sp. Cas13d.

[0171] SEQ ID NO: 131 is an exemplary consensus DR nucleic acid sequence for Rum. Flavefaciens strain XPD3002 Cas13d and CasRx.

[0172] SEQ ID NOS: 132-137 are exemplary consensus DR nucleic acid sequences.

[0173] SEQ ID NO: 138 is an exemplary 50% consensus sequence for seven full-length Cas13d orthologues.

[0174] SEQ ID NO: 139 is an exemplary Cas13d nucleic acid sequence from Gut metagenome P1E0.

[0175] SEQ ID NO: 140 is an exemplary Cas13d nucleic acid sequence from Anaerobic digester.

[0176] SEQ ID NO: 141 is an exemplary Cas13d nucleic acid sequence from Ruminococcus sp. CAG:57.

[0177] SEQ ID NO: 142 is an exemplary human codon-optimized uncultured Gut metagenome P1E0 Cas13d nucleic acid sequence.

[0178] SEQ ID NO: 143 is an exemplary human codon-optimized Anaerobic Digester Cas13d nucleic acid sequence.

[0179] SEQ ID NO: 144 is an exemplary human codon-optimized Ruminococcus flavefaciens XPD Cas13d nucleic acid sequence.

[0180] SEQ ID NO: 145 is an exemplary human codon-optimized Ruminococcus albus Cas13d nucleic acid sequence.

[0181] SEQ ID NO: 146 is an exemplary processing of the Ruminococcus sp. CAG:57 CRISPR array.

[0182] SEQ ID NO: 147 is an exemplary Cas13d protein sequence from contig emb|OBVH01003037.1, human gut metagenome sequence (also found in WGS contigs emb|OBXZ01000094.1| and emb|OBJF01000033.1.

[0183] SEQ ID NO: 148 is an exemplary consensus DR nucleic acid sequence (goes with SEQ ID NO: 147).

[0184] SEQ ID NO: 149 is an exemplary Cas13d protein sequence from contig tpg|DBYI01000091.1| (Uncultivated Ruminococcus flavefaciens UBA1190 assembled from bovine gut metagenome).

[0185] SEQ ID NOS: 150-152 are exemplary consensus DR nucleic acid sequences (goes with SEQ ID NO: 149).

[0186] SEQ ID NO: 153 is an exemplary Cas13d protein sequence from contig tpg|DJXD01000002.1| (uncultivated Ruminococcus assembly, UBA7013, from sheep gut metagenome).

[0187] SEQ ID NO: 154 is an exemplary consensus DR nucleic acid sequence (goes with SEQ ID NO: 153).

[0188] SEQ ID NO: 155 is an exemplary Cas13d protein sequence from contig OGZC01000639.1 (human gut metagenome assembly).

[0189] SEQ ID NOS: 156-177 are exemplary consensus DR nucleic acid sequences (goes with SEQ ID NO: 155).

[0190] SEQ ID NO: 158 is an exemplary Cas13d protein sequence from contig emb|OHBM01000764.1 (human gut metagenome assembly).

[0191] SEQ ID NO: 159 is an exemplary consensus DR nucleic acid sequence (goes with SEQ ID NO: 158).

[0192] SEQ ID NO: 160 is an exemplary Cas13d protein sequence from contig emb|OHCP01000044.1 (human gut metagenome assembly).

[0193] SEQ ID NO: 161 is an exemplary consensus DR nucleic acid sequence (goes with SEQ ID NO: 160).

[0194] SEQ ID NO: 162 is an exemplary Cas13d protein sequence from contig emb|OGDF01008514.1| (human gut metagenome assembly).

[0195] SEQ ID NO: 163 is an exemplary consensus DR nucleic acid sequence (goes with SEQ ID NO: 162).

[0196] SEQ ID NO: 164 is an exemplary Cas13d protein sequence from contig emb|OGPN01002610.1 (human gut metagenome assembly).

[0197] SEQ ID NO: 165 is an exemplary consensus DR nucleic acid sequence (goes with SEQ ID NO: 164).

[0198] SEQ ID NO: 166 is an exemplary Cas13d protein sequence from contig NFIR01000008.1 (Eubacterium sp. An3, from chicken gut metagenome).

[0199] SEQ ID NO: 167 is an exemplary consensus DR nucleic acid sequence (goes with SEQ ID NO: 166).

[0200] SEQ ID NO: 168 is an exemplary Cas13d protein sequence from contig NFLV01000009.1 (Eubacterium sp. An11, from chicken gut metagenome).

[0201] SEQ ID NO: 169 is an exemplary consensus DR nucleic acid sequence (goes with SEQ ID NO: 168).

[0202] SEQ ID NOS: 171-174 are an exemplary Cas13d motif sequences.

[0203] SEQ ID NO: 175 is an exemplary Cas13d protein sequence from contig OJMM01002900 human gut metagenome sequence.

[0204] SEQ ID NO: 176 is an exemplary consensus DR nucleic acid sequence (goes with SEQ ID NO: 175).

[0205] SEQ ID NO: 177 is an exemplary Cas13d protein sequence from contig ODAI011611274.1 gut metagenome sequence.

[0206] SEQ ID NO: 178 is an exemplary consensus DR nucleic acid sequence (goes with SEQ ID NO: 177).

[0207] SEQ ID NO: 179 is an exemplary Cas13d protein sequence from contig OIZX01000427.1.

[0208] SEQ ID NO: 180 is an exemplary consensus DR nucleic acid sequence (goes with SEQ ID NO: 179).

[0209] SEQ ID NO: 181 is an exemplary Cas13d protein sequence from contig emb|OCVV012889144.1.

[0210] SEQ ID NO: 182 is an exemplary consensus DR nucleic acid sequence (goes with SEQ ID NO: 181).

[0211] SEQ ID NO: 183 is an exemplary Cas13d protein sequence from contig OCTW011587266.1

[0212] SEQ ID NO: 184 is an exemplary consensus DR nucleic acid sequence (goes with SEQ ID NO: 183).

[0213] SEQ ID NO: 185 is an exemplary Cas13d protein sequence from contig emb|OGNF01009141.1.

[0214] SEQ ID NO: 186 is an exemplary consensus DR nucleic acid sequence (goes with SEQ ID NO: 185).

[0215] SEQ ID NO: 187 is an exemplary Cas13d protein sequence from contig emb|OIEN01002196.1.

[0216] SEQ ID NO: 188 is an exemplary consensus DR nucleic acid sequence (goes with SEQ ID NO: 187).

[0217] SEQ ID NO: 189 is an exemplary Cas13d protein sequence from contig e-k87_11092736.

[0218] SEQ ID NO: 190-193 are exemplary consensus DR nucleic acid sequences (goes with SEQ ID NO: 189).

[0219] SEQ ID NO: 194 is an exemplary Cas13d sequence from Gut_metagenome_contig6893000291.

[0220] SEQ ID NO: 195-197 are exemplary Cas13d motif sequences.

[0221] SEQ ID NO: 198 is an exemplary Cas13d protein sequence from Ga0224415_10007274.

[0222] SEQ ID NO: 199 is an exemplary consensus DR nucleic acid sequence (goes with SEQ ID NO: 198).

[0223] SEQ ID NO: 200 is an exemplary Cas13d protein sequence from EMG_10003641.

[0224] SEQ ID NO: 201 is an exemplary consensus DR nucleic acid sequence (goes with SEQ ID NO: 200).

[0225] SEQ ID NO: 202 is an exemplary Cas13d protein sequence from Ga0129306_1000735.

[0226] SEQ ID NO: 203 is an exemplary consensus DR nucleic acid sequence (goes with SEQ ID NO: 202).

[0227] SEQ ID NO: 204 is an exemplary Cas13d protein sequence from Ga0129317_1008067.

[0228] SEQ ID NO: 205 is an exemplary consensus DR nucleic acid sequence (goes with SEQ ID NO: 204).

[0229] SEQ ID NO: 206 is an exemplary Cas13d protein sequence from Ga0224415_10048792.

[0230] SEQ ID NO: 207 is an exemplary consensus DR nucleic acid sequence (goes with SEQ ID NO: 206).

[0231] SEQ ID NO: 208 is an exemplary Cas13d protein sequence from 160582958_gene49834.

[0232] SEQ ID NO: 209 is an exemplary consensus DR nucleic acid sequence (goes with SEQ ID NO: 208).

[0233] SEQ ID NO: 210 is an exemplary Cas13d protein sequence from 250twins_35838_GL0110300.

[0234] SEQ ID NO: 211 is an exemplary consensus DR nucleic acid sequence (goes with SEQ ID NO: 210).

[0235] SEQ ID NO: 212 is an exemplary Cas13d protein sequence from 250twins_36050_GL0158985.

[0236] SEQ ID NO: 213 is an exemplary consensus DR nucleic acid sequence (goes with SEQ ID NO: 212).

[0237] SEQ ID NO: 214 is an exemplary Cas13d protein sequence from 31009_GL0034153.

[0238] SEQ ID NO: 215 is an exemplary consensus DR nucleic acid sequence (goes with SEQ ID NO: 214).

[0239] SEQ ID NO: 216 is an exemplary Cas13d protein sequence from 530373_GL0023589.

[0240] SEQ ID NO: 217 is an exemplary consensus DR nucleic acid sequence (goes with SEQ ID NO: 216).

[0241] SEQ ID NO: 218 is an exemplary Cas13d protein sequence from BMZ-11B_GL0037771.

[0242] SEQ ID NO: 219 is an exemplary consensus DR nucleic acid sequence (goes with SEQ ID NO: 218).

[0243] SEQ ID NO: 220 is an exemplary Cas13d protein sequence from BMZ-11B_GL0037915.

[0244] SEQ ID NO: 221 is an exemplary consensus DR nucleic acid sequence (goes with SEQ ID NO: 220).

[0245] SEQ ID NO: 222 is an exemplary Cas13d protein sequence from BMZ-11B_GL0069617.

[0246] SEQ ID NO: 223 is an exemplary consensus DR nucleic acid sequence (goes with SEQ ID NO: 222).

[0247] SEQ ID NO: 224 is an exemplary Cas13d protein sequence from—DLF014_GL0011914.

[0248] SEQ ID NO: 225 is an exemplary consensus DR nucleic acid sequence (goes with SEQ ID NO: 224).

[0249] SEQ ID NO: 226 is an exemplary Cas13d protein sequence from EYZ-362B_GL0088915.

[0250] SEQ ID NO: 227-228 are exemplary consensus DR nucleic acid sequences (goes with SEQ ID NO: 226).

[0251] SEQ ID NO: 229 is an exemplary Cas13d protein sequence from Ga0099364_10024192.

[0252] SEQ ID NO: 230 is an exemplary consensus DR nucleic acid sequence (goes with SEQ ID NO: 229).

[0253] SEQ ID NO: 231 is an exemplary Cas13d protein sequence from Ga0187910_10006931.

[0254] SEQ ID NO: 232 is an exemplary consensus DR nucleic acid sequence (goes with SEQ ID NO: 231).

[0255] SEQ ID NO: 233 is an exemplary Cas13d protein sequence from Ga0187910_10015336.

[0256] SEQ ID NO: 234 is an exemplary consensus DR nucleic acid sequence (goes with SEQ ID NO: 233).

[0257] SEQ ID NO: 235 is an exemplary Cas13d protein sequence from Ga0187910_10040531.

[0258] SEQ ID NO: 236 is an exemplary consensus DR nucleic acid sequence (goes with SEQ ID NO: 235).

[0259] SEQ ID NO: 237 is an exemplary Cas13d protein sequence from Ga0187911_10069260.

[0260] SEQ ID NO: 238 is an exemplary consensus DR nucleic acid sequence (goes with SEQ ID NO: 237).

[0261] SEQ ID NO: 239 is an exemplary Cas13d protein sequence from MH0288_GL0082219.

[0262] SEQ ID NO: 240 is an exemplary consensus DR nucleic acid sequence (goes with SEQ ID NO: 239).

[0263] SEQ ID NO: 241 is an exemplary Cas13d protein sequence from O2.UC29-0_GL0096317.

[0264] SEQ ID NO: 242 is an exemplary consensus DR nucleic acid sequence (goes with SEQ ID NO: 241).

[0265] SEQ ID NO: 243 is an exemplary Cas13d protein sequence from PIG-014_GL0226364.

[0266] SEQ ID NO: 244 is an exemplary consensus DR nucleic acid sequence (goes with SEQ ID NO: 243).

[0267] SEQ ID NO: 245 is an exemplary Cas13d protein sequence from PIG-018_GL0023397.

[0268] SEQ ID NO: 246 is an exemplary consensus DR nucleic acid sequence (goes with SEQ ID NO: 245).

[0269] SEQ ID NO: 247 is an exemplary Cas13d protein sequence from PIG-025_GL0099734.

[0270] SEQ ID NO: 248 is an exemplary consensus DR nucleic acid sequence (goes with SEQ ID NO: 247).

[0271] SEQ ID NO: 249 is an exemplary Cas13d protein sequence from PIG-028_GL0185479.

[0272] SEQ ID NO: 250 is an exemplary consensus DR nucleic acid sequence (goes with SEQ ID NO: 249).

[0273] SEQ ID NO: 251 is an exemplary Cas13d protein sequence from—Ga0224422_10645759.

[0274] SEQ ID NO: 252 is an exemplary consensus DR nucleic acid sequence (goes with SEQ ID NO: 251).

[0275] SEQ ID NO: 253 is an exemplary Cas13d protein sequence from ODAI chimera.

[0276] SEQ ID NO: 254 is an exemplary consensus DR nucleic acid sequence (goes with SEQ ID NO: 253).

[0277] SEQ ID NO: 255 is an HEPN motif.

[0278] SEQ ID NOs: 256 and 257 are exemplary Cas13d nuclear localization signal amino acid and nucleic acid sequences, respectively.

[0279] SEQ ID NOs: 258 and 260 are exemplary SV40 large T antigen nuclear localization signal amino acid and nucleic acid sequences, respectively.

[0280] SEQ ID NO: 259 is a dCas9 target sequence.

[0281] SEQ ID NO: 261 is an artificial Eubacterium siraeum nCas1 array targeting ccdB.

[0282] SEQ ID NO: 262 is a full 36 nt direct repeat.

[0283] SEQ ID NOs: 263-266 are spacer sequences.

[0284] SEQ ID NO: 267 is an artificial uncultured Ruminoccus sp. nCas1 array targeting ccdB.

[0285] SEQ ID NO: 268 is a full 36 nt direct repeat.

[0286] SEQ ID NOs: 269-272 are spacer sequences.

[0287] SEQ ID NO: 273 is a ccdB target RNA sequence.

[0288] SEQ ID NOs: 274-277 are spacer sequences.

### DETAILED DESCRIPTION

[0289] Unless otherwise noted, technical terms are used according to conventional usage. Definitions of common terms in molecular biology can be found in Benjamin Lewin, Genes VII, published by Oxford University Press, 1999; Kendrew et al. (eds.), The Encyclopedia of Molecular Biology, published by Blackwell Science Ltd., 1994; and Robert A. Meyers (ed.), Molecular Biology and Biotechnology: a Comprehensive Desk Reference, published by VCH Publishers, Inc., 1995; and other similar references.

[0290] As used herein, the singular forms “a,” “an,” and “the,” refer to both the singular as well as plural, unless the context clearly indicates otherwise. As used herein, the term “comprises” means “includes.” Thus, “comprising a nucleic acid molecule” means “including a nucleic acid molecule” without excluding other elements. It is further to be understood that any and all base sizes given for nucleic acids are approximate, and are provided for descriptive purposes, unless otherwise indicated. Although many methods and materials similar or equivalent to those described herein can be used, particular suitable methods and materials are described below. In case of conflict, the present specification, including explanations of terms, will control. In addition, the materials, methods, and examples are illustrative only and not intended to be limiting. All references, including patent applications and patents, are herein incorporated by reference in their entireties.

[0291] In order to facilitate review of the various embodiments of the disclosure, the following explanations of specific terms are provided:

### I. Terms

[0292] Administration: To provide or give a subject an agent, such as an Cas13d protein (or Cas13d coding sequence) or guide molecule (or coding sequence) disclosed herein, by any effective route. Exemplary routes of administration include, but are not limited to, injection (such as subcutaneous, intramuscular, intradermal, intraperitoneal, intratumoral, and intravenous), transdermal, intranasal, and inhalation routes.

[0293] Cas13d (also referred to as CasR, for CRISPR-associated RNase, and Cas13d): An RNA-guided RNA endonuclease enzyme that can cut or bind RNA. Cas13d proteins include one or two HEPN domains (e.g., see SEQ ID NOS: 1-3, 42, 62, 70, 82, 83, 92, 93, 94, 95, 96, 97, 98, 99, 100, 101, 102, 103, 104, 105, 106, 107, 108, 109, 110, 111, 112, 113, 138, 147, 149, 153, 155, 158, 160, 162, 164, 166, 168, 170, 175, 177, 179, 181, 183, 185, 187, 189, 194, 198, 200, 202, 204, 206, 208, 210, 212, 214, 216, 218, 220, 222, 224, 226, 229, 231, 233, 235, 237, 239, 241, 243, 245, 247, 249, 251, and 253). Native HEPN domains include the sequence RXXXXH (SEQ ID NO: 255). Cas13d proteins that include mutated HEPN domain(s), and thus cannot cut RNA, but can process guide RNA, are also encompassed by this disclosure (e.g., see SEQ ID NOS: 2 and 4). An alignment of native Cas13d proteins is shown in FIG. S2A. In addition, Cas13d proteins specifically recognize direct repeat sequences of gRNA having a particular secondary structure (e.g., see FIG. S2C). In one example, Cas13d proteins recognize and/or bind a DR having (1) a loop of about 4 to 8 nt, (2) a stem of 4 to 12 nt, stem formed of complementary nucleotides, which can include a small (e.g., 1 or 2 bp) bulge due to a nt mismatch in the stem, and (3) a bulge or overhang formed of unpaired nt, which can be about 10 to 14 nt (e.g., 5 to 7 to on either side).

[0294] In one example, the full length (non-truncated) Cas13d protein is between 870-1080 amino acids long. In one example, the Cas13d protein is derived from a genome sequence of a bacterium from the Order Clostridiales or a metagenomic sequence. In one example, the corresponding DR sequence of an Cas13d protein is located at the 5′ end of the spacer sequence in the molecule that includes the Cas13d gRNA. In one example, the DR sequence in the Cas13d gRNA is truncated at the 5′ end relative to the DR sequence in the unprocessed Cas13d guide array transcript. In one example, the DR sequence in the Cas13d gRNA is truncated by 5-7 nt at the 5′ end by the Cas13d protein. In one example, the Cas13d protein can cut a target RNA flanked at the 3′ end of the spacer-target duplex by any of a A, U, G or C ribonucleotide and flanked at the 5′ end by any of a A, U, G or C ribonucleotide.

[0295] In one example, an Cas13d protein has at least 80%, at least 85%, at least 90%, at least 91%, at least 92%, at least 95%, at least 96%, at least 97%, at least 98% or at least 99% sequence identity to SEQ ID NO: 1, 2, 3, 4, 5, 6, 7, 8, 9, 10, 11, 12, 13, 14, 15, 16, 17, 18, 19, 20, 21, 22, 23, 24, 25, 26, 27, 28, 29, 30, 31, 32, 33, 34, 35, 36, 37, 38, 39, 40, 41, 42, 43, 44, 45, 46, 47, 48, 49, 50, 51, 52, 53, 54, 55, 56, 57, 58, 59, 60, 61, 62, 63, 64, 65, 66, 67, 68, 69, 70, 71, 72, 73, 74, 75, 76, 77, 78, 79, 80, 81, 82, 83, 84, 85, 86, 87, 88, 89, 90, 91, 92, 93, 94, 95, 96, 97, 98, 99, 100, 101, 102, 103, 104, 105, 106, 107, 108, 109, 110, 111, 112, 113, 138, 147, 149, 153, 155, 158, 160, 162, 164, 166, 168, 170, 175, 177, 179, 181, 183, 185, 187, 189, 194, 198, 200, 202, 204, 206, 208, 210, 212, 214, 216, 218, 220, 222, 224, 226, 229, 231, 233, 235, 237, 239, 241, 243, 245, 247, 249, 251, or 253.

[0296] In one example, an Cas13d protein contains two HEPN Rnase domains which contain a RXXXXH amino acid motif (SEQ ID NO: 255; where X indicates any amino acid). In addition, an Cas13d protein can include one or more of the following amino acid motifs written in the common Prosite format:

### Motif 1: L-x(5)-[FWY]-x(3)-K-[NQS]-[ILM]-[ILMV]-x(2)-N-x(2)-[FWY]-x(2)-[AG]-x(4)-[DE]-x-D (SEQ ID NO: 195)

### Motif 2: [FWY]-[ILV]-x(2)-[NQS]-[ILV]-x(2)-[DNST]-x(2)-F-x-Y-x(2)-[HKR]-[FHY] (SEQ ID NO: 196)

### Motif 3: Y-[CDNSV]-x(2)-R-[FWY]-x-[ADNT]-[LM]-[ST]-x(4)-[FWY] (SEQ ID NO: 197)

[0297] Thus, in some examples, an Cas13d protein having at least 80%, at least 85%, at least 90%, at least 91%, at least 92%, at least 95%, at least 96%, at least 97%, at least 98% or at least 99% sequence identity to SEQ ID NO: 1, 2, 3, 4, 5, 6, 7, 8, 9, 10, 11, 12, 13, 14, 15, 16, 17, 18, 19, 20, 21, 22, 23, 24, 25, 26, 27, 28, 29, 30, 31, 32, 33, 34, 35, 36, 37, 38, 39, 40, 41, 42, 43, 44, 45, 46, 47, 48, 49, 50, 51, 52, 53, 54, 55, 56, 57, 58, 59, 60, 61, 62, 63, 64, 65, 66, 67, 68, 69, 70, 71, 72, 73, 74, 75, 76, 77, 78, 79, 80, 81, 82, 83, 84, 85, 86, 87, 88, 89, 90, 91, 92, 93, 94, 95, 96, 97, 98, 99, 100, 101, 102, 103, 104, 105, 106, 107, 108, 109, 110, 111, 112, 113, 138, 147, 149, 153, 155, 158, 160, 162, 164, 166, 168, 170, 175, 177, 179, 181, 183, 185, 187, 189, 194, 198, 200, 202, 204, 206, 208, 210, 212, 214, 216, 218, 220, 222, 224, 226, 229, 231, 233, 235, 237, 239, 241, 243, 245, 247, 249, 251, or 253, includes the motif of SEQ ID NO: 195, 196 or 197.

[0298] Complementarity: The ability of a nucleic acid to form hydrogen bond(s) with another nucleic acid sequence by either traditional Watson-Crick base pairing or other non-traditional types. A percent complementarity indicates the percentage of residues in a nucleic acid molecule which can form hydrogen bonds (e.g., Watson-Crick base pairing) with a second nucleic acid sequence (e.g., 5, 6, 7, 8, 9, 10 out of 10 being 50%, 60%, 70%, 80%, 90%, and 100% complementary). “Perfectly complementary” means that all the contiguous residues of a nucleic acid sequence will hydrogen bond with the same number of contiguous residues in a second nucleic acid sequence. “Substantially complementary” as used herein refers to a degree of complementarity that is at least 60%, 65%, 70%, 75%, 80%, 85%, 90%, 95%, 97%, 98%, 99%, or 100% over a region of 8, 9, 10, 11, 12, 13, 14, 15, 16, 17, 18, 19, 20, 21, 22, 23, 24, 25, 30, 35, 40, 45, 50, or more nucleotides, or refers to two nucleic acids that hybridize under stringent conditions.

[0299] CRISPRs (Clustered Regularly InterSpaced Repeats): The CRISPR RNA array is a defining feature of CRISPR systems. The term “CRISPR” refers to the architecture of the array which includes constant direct repeats (DRs) interspaced with the variable spacers. In some examples, a CRISPR array includes at least a DR-spacer-DR-spacer (see FIG. 1A). This feature was used in the disclosed computational pipeline to identify the novel Cas13d protein family (FIG. 1A). In bacteria, the array is transcribed as one single transcript (containing multiple crRNA units), which is then processed by the Cas13d protein and other RNases into individual crRNAs. CRISPRs are found in approximately 40% of sequenced bacteria genomes and 90% of sequenced archaea. CRISPRs are often associated with cas genes that code for proteins related to CRISPRs (such as the Cas13d proteins provided herein). The disclosed CRISPR/Cas system can be used for RNA targeting, for example to detect a target RNA, modify a target RNA at any desired location, or cut the target RNA at any desired location.

[0300] Downregulated or knocked down: When used in reference to the expression of a molecule, such as a target RNA, refers to any process which results in a decrease in production of the target RNA, but in some examples not complete elimination of the target RNA product or target RNA function. In one example, downregulation or knock down does not result in complete elimination of detectable target RNA expression or target RNA activity. In some examples, the target RNA is a coding RNA. In some examples, the target RNA is non-coding RNA. Specific examples of RNA molecules that can be targeted for downregulation include mRNA, miRNA, rRNA, tRNA, nuclear RNA, lincRNA, circular RNA, and structural RNA. In some examples, downregulation or knock down of a target RNA includes processes that decrease translation of the target RNA and thus can decrease the presence of corresponding proteins. The disclosed CRISPR/Cas system can be used to downregulate any target RNA of interest.

[0301] Downregulation or knock down includes any detectable decrease in the target RNA. In certain examples, detectable target RNA in a cell or cell free system decreases by at least 10%, at least 20%, at least 30%, at least 40%, at least 50%, at least 60%, at least 70%, at least 75%, at least 80%, at least 90%, at least 95%, at least 96%, at least 97%, at least 98%, or at least 99% (such as a decrease of 40% to 90%, 40% to 80% or 50% to 95%) as compared to a control (such an amount of target RNA detected in a corresponding normal cell or sample). In one example, a control is a relative amount of expression in a normal cell (e.g., a non-recombinant cell that does not include Cas13d or guide RNA).

[0302] Effective amount: The amount of an agent (such as the CRISPR/Cas agents provided herein) that is sufficient to effect beneficial or desired results.

[0303] A therapeutically effective amount may vary depending upon one or more of: the subject and disease condition being treated, the weight and age of the subject, the severity of the disease condition, the manner of administration and the like, which can readily be determined by one of ordinary skill in the art. The beneficial therapeutic effect can include enablement of diagnostic determinations; amelioration of a disease, symptom, disorder, or pathological condition; reducing or preventing the onset of a disease, symptom, disorder or condition; and generally counteracting a disease, symptom, disorder or pathological condition. In one embodiment, an “effective amount” is an amount sufficient to reduce symptoms of a disease, for example by at least 10%, at least 20%, at least 50%, at least 70%, or at least 90% (as compared to no administration of the therapeutic agent).

[0304] The term also applies to a dose that will allow for expression of an Cas13d and/or gRNA herein, and that allows for targeting (e.g., detection or modification) of a target RNA.

[0305] Increase or Decrease: A statistically significant positive or negative change, respectively, in quantity from a control value. An increase is a positive change, such as an increase at least 50%, at least 100%, at least 200%, at least 300%, at least 400% or at least 500% as compared to the control value. A decrease is a negative change, such as a decrease of at least 20%, at least 25%, at least 50%, at least 75%, at least 80%, at least 90%, at least 95%, at least 98%, at least 99%, or at least 100% decrease as compared to a control value. In some examples the decrease is less than 100%, such as a decrease of no more than 90%, no more than 95% or no more than 99%.

[0306] Isolated: An “isolated” biological component (such as an Cas13d protein or nucleic acid, gRNA, or cell containing such) has been substantially separated, produced apart from, or purified away from other biological components in the cell or tissue of an organism in which the component occurs, such as other cells, chromosomal and extrachromosomal DNA and RNA, and proteins. Nucleic acids and proteins that have been “isolated” include nucleic acids and proteins purified by standard purification methods. The term also embraces nucleic acids and proteins prepared by recombinant expression in a host cell as well as chemically synthesized nucleic acids and proteins. Isolated Cas13d proteins or nucleic acids, or cells containing such, in some examples are at least 50% pure, such as at least 75%, at least 80%, at least 90%, at least 95%, at least 98%, or at least 100% pure.

[0307] Label: A compound or composition that is conjugated directly or indirectly to another molecule (such as a nucleic acid molecule) to facilitate detection of that molecule. Specific, non-limiting examples of labels include fluorescent and fluorogenic moieties, chromogenic moieties, haptens, affinity tags, and radioactive isotopes. The label can be directly detectable (e.g., optically detectable) or indirectly detectable (for example, via interaction with one or more additional molecules that are in turn detectable).

[0308] Modulate: A change in the content of RNA. Modulation can include, but is not limited to, RNA activation (e.g., upregulation), RNA repression (e.g., downregulation), ribonucleotide deletion, ribonucleotide insertion, ribonucleotide chemical modification, ribonucleotide covalent or non-covalent linkage, and/or ribonucleotide substitution.

[0309] Non-naturally occurring or engineered: Terms used herein as interchangeably and indicate the involvement of the hand of man. The terms, when referring to nucleic acid molecules or polypeptides indicate that the nucleic acid molecule or the polypeptide is at least substantially free from at least one other component with which they are naturally associated in nature and as found in nature. In addition, the terms can indicate that the nucleic acid molecules or polypeptides have a sequence not found in nature.

[0310] Operably linked: A first nucleic acid sequence is operably linked with a second nucleic acid sequence when the first nucleic acid sequence is placed in a functional relationship with the second nucleic acid sequence. For instance, a promoter is operably linked to a coding sequence (such as a coding sequence of an Cas13d protein) if the promoter affects the transcription or expression of the coding sequence. Generally, operably linked DNA sequences are contiguous and, where necessary to join two protein-coding regions, in the same reading frame.

[0311] Pharmaceutically acceptable carriers: The pharmaceutically acceptable carriers useful in this invention are conventional. Remington's Pharmaceutical Sciences, by E. W. Martin, Mack Publishing Co., Easton, Pa., 15th Edition (1975), describes compositions and formulations suitable for pharmaceutical delivery of an Cas13d protein or nucleic acid molecule (or other molecules needed for modifying RNA using the disclosed CRISPR/Cas system with the disclosed Cas13d proteins).

[0312] In general, the nature of the carrier will depend on the particular mode of administration being employed. For instance, parenteral formulations usually comprise injectable fluids that include pharmaceutically and physiologically acceptable fluids such as water, physiological saline, balanced salt solutions, aqueous dextrose, glycerol or the like as a vehicle. In addition to biologically-neutral carriers, pharmaceutical compositions to be administered can contain minor amounts of non-toxic auxiliary substances, such as wetting or emulsifying agents, preservatives, and pH buffering agents and the like, for example sodium acetate or sorbitan monolaurate.

[0313] Polypeptide, peptide and protein: Refer to polymers of amino acids of any length. The polymer may be linear or branched, it may comprise modified amino acids, and it may be interrupted by non-amino acids. The terms also encompass an amino acid polymer that has been modified; for example, disulfide bond formation, glycosylation, lipidation, acetylation, phosphorylation, or any other manipulation, such as conjugation with a labeling component. As used herein the term “amino acid” includes natural and/or unnatural or synthetic amino acids, including glycine and both the D or L optical isomers, and amino acid analogs and peptidomimetics.

[0314] Promoter: An array of nucleic acid control sequences which direct transcription of a nucleic acid. A promoter includes necessary nucleic acid sequences near the start site of transcription. A promoter also optionally includes distal enhancer or repressor elements. A “constitutive promoter” is a promoter that is continuously active and is not subject to regulation by external signals or molecules. In contrast, the activity of an “inducible promoter” is regulated by an external signal or molecule (for example, a transcription factor).

[0315] Recombinant or host cell: A cell that has been genetically altered, or is capable of being genetically altered by introduction of an exogenous polynucleotide, such as a recombinant plasmid or vector. Typically, a host cell is a cell in which a vector can be propagated and its nucleic acid expressed. Such cells can be eukaryotic or prokaryotic. The term also includes any progeny of the subject host cell. It is understood that all progeny may not be identical to the parental cell since there may be mutations that occur during replication. However, such progeny are included when the term “host cell” is used.

[0316] Regulatory element: A phrase that includes promoters, enhancers, internal ribosomal entry sites (IRES), and other expression control elements (e.g., transcription termination signals, such as polyadenylation signals and poly-U sequences). Such regulatory elements are described, for example, in Goeddel, GENE EXPRESSION TECHNOLOGY: METHODS IN ENZYMOLOGY 185, Academic Press, San Diego, Calif. (1990) which is hereby incorporated by reference in its entirety. Regulatory elements include those that direct constitutive expression of a nucleotide sequence in many types of host cells and those that direct expression of the nucleotide sequence only in certain host cells (e.g., tissue-specific regulatory sequences). A tissue-specific promoter may direct expression primarily in a desired tissue of interest, such as muscle, neuron, bone, skin, blood, specific organs (e.g., liver, pancreas), or particular cell types (e.g., lymphocytes). Regulatory elements may also direct expression in a temporal-dependent manner, such as in a cell-cycle dependent or developmental stage-dependent manner, which may or may not also be tissue or cell-type specific.

[0317] In some embodiments, a vector provided herein includes a pol III promoter (e.g., U6 and H1 promoters), a pol II promoter (e.g., the retroviral Rous sarcoma virus (RSV) LTR promoter (optionally with the RSV enhancer), the cytomegalovirus (CMV) promoter (optionally with the CMV enhancer), the SV40 promoter, the dihydrofolate reductase promoter, the β-actin promoter, the phosphoglycerol kinase (PGK) promoter, and the EF1α promoter), or both.

[0318] Also encompassed by the term “regulatory element” are enhancer elements, such as WPRE; CMV enhancers; the R-U5′ segment in LTR of HTLV-I; SV40 enhancer; and the intron sequence between exons 2 and 3 of rabbit β-globin.

[0319] RNA Editing: A type of genetic engineering in which a RNA molecule (or ribonucleotides of the RNA) is inserted, deleted or replaced in the genome of an organism using engineered nucleases (such as the Cas13d proteins provided herein), which create site-specific strand breaks at desired locations in the RNA. The induced breaks are repaired resulting in targeted mutations or repairs. The CRISPR/Cas methods disclosed herein, such as those that use an Cas13d, can be used to edit the sequence of one or more target RNAs, such as one associated with cancer (e.g., breast cancer, colon cancer, melanoma), infectious disease (such as HIV, hepatitis, HPV, and West Nile virus), or neurodegenerative disorder (e.g., Huntington's disease or ALS). For example, RNA editing can be used to treat a disease or viral infection.

[0320] RNA insertion site: A site of the RNA that is targeted for, or has undergone, insertion of an exogenous polynucleotide. The disclosed methods include use of a disclosed Cas13d protein, which can be used to target a RNA for manipulation at a RNA insertion site.

[0321] Sequence identity/similarity: The similarity between amino acid (or nucleotide) sequences is expressed in terms of the similarity between the sequences, otherwise referred to as sequence identity. Sequence identity is frequently measured in terms of percentage identity (or similarity or homology); the higher the percentage, the more similar the two sequences are.

[0322] Methods of alignment of sequences for comparison are well known in the art. Various programs and alignment algorithms are described in: Smith and Waterman, Adv. Appl. Math. 2:482, 1981; Needleman and Wunsch, J. Mol. Biol. 48:443, 1970; Pearson and Lipman, Proc. Natl. Acad. Sci. U.S.A. 85:2444, 1988; Higgins and Sharp, Gene 73:237, 1988; Higgins and Sharp, CABIOS 5:151, 1989; Corpet et al., Nucleic Acids Research 16:10881, 1988; and Pearson and Lipman, Proc. Natl. Acad. Sci. U.S.A. 85:2444, 1988. Altschul et al., Nature Genet. 6:119, 1994, presents a detailed consideration of sequence alignment methods and homology calculations.

[0323] The NCBI Basic Local Alignment Search Tool (BLAST) (Altschul et al., J. Mol. Biol. 215:403, 1990) is available from several sources, including the National Center for Biotechnology Information (NCBI, Bethesda, Md.) and on the internet, for use in connection with the sequence analysis programs blastp, blastn, blastx, tblastn and tblastx. A description of how to determine sequence identity using this program is available on the NCBI website on the internet.

[0324] Variants of protein and nucleic acid sequences known in the art and disclosed herein are typically characterized by possession of at least about 80%, at least 90%, at least 95%, at least 96%, at least 97%, at least 98% or at least 99% sequence identity counted over the full length alignment with the amino acid sequence using the NCBI Blast 2.0, gapped blastp set to default parameters. For comparisons of amino acid sequences of greater than about 30 amino acids, the Blast 2 sequences function is employed using the default BLOSUM62 matrix set to default parameters, (gap existence cost of 11, and a per residue gap cost of 1). When aligning short peptides (fewer than around 30 amino acids), the alignment should be performed using the Blast 2 sequences function, employing the PAM30 matrix set to default parameters (open gap 9, extension gap 1 penalties). Proteins with even greater similarity to the reference sequences will show increasing percentage identities when assessed by this method, such as at least 95%, at least 98%, or at least 99% sequence identity. When less than the entire sequence is being compared for sequence identity, homologs and variants will typically possess at least 80% sequence identity over short windows of 10-20 amino acids, and may possess sequence identities of at least 85% or at least 90% or at least 95% depending on their similarity to the reference sequence. Methods for determining sequence identity over such short windows are available at the NCBI website on the internet. One of skill in the art will appreciate that these sequence identity ranges are provided for guidance only; it is entirely possible that strongly significant homologs could be obtained that fall outside of the ranges provided.

[0325] Thus, in one example, an Cas13d protein has at least 80%, at least 85%, at least 90%, at least 91%, at least 92%, at least 95%, at least 96%, at least 97%, at least 98% or at least 99% sequence identity to SEQ ID NO: 1, 2, 3, 4, 5, 6, 7, 8, 9, 10, 11, 12, 13, 14, 15, 16, 17, 18, 19, 20, 21, 22, 23, 24, 25, 26, 27, 28, 29, 30, 31, 32, 33, 34, 35, 36, 37, 38, 39, 40, 41, 42, 43, 44, 45, 46, 47, 48, 49, 50, 51, 52, 53, 54, 55, 56, 57, 58, 59, 60, 61, 62, 63, 64, 65, 66, 67, 68, 69, 70, 71, 72, 73, 74, 75, 76, 77, 78, 79, 80, 81, 82, 83, 84, 85, 86, 87, 88, 89, 90, 91, 92, 93, 94, 95, 96, 97, 98, 99, 100, 101, 102, 103, 104, 105, 106, 107, 108, 109, 110, 111, 112, 113, 138, 147, 19, 153, 155, 158, 160, 162, 164, 166, 168, 170, 175, 177, 179, 181, 183, 185, 187, 189, 194, 198, 200, 202, 204, 206, 208, 210, 212, 214, 216, 218, 220, 222, 224, 226, 229, 231, 233, 235, 237, 239, 241, 243, 245, 247, 249, 251, or 253.

[0326] Subject: A vertebrate, such as a mammal, for example a human. Mammals include, but are not limited to, murines, simians, humans, farm animals, sport animals, and pets. In one embodiment, the subject is a non-human mammalian subject, such as a monkey or other non-human primate, mouse, rat, rabbit, pig, goat, sheep, dog, cat, horse, or cow. In some examples, the subject has a disorder (e.g., viral infection) or genetic disease that can be treated using methods provided herein. In some examples, the subject has a disorder (e.g., viral infection) or genetic disease that can be diagnosed using methods provided herein. In some examples, the subject is a laboratory animal/organism, such as a zebrafish, Xenopus, C. elegans, Drosophila, mouse, rabbit, or rat. Tissues, cells and their progeny of a biological entity obtained in vivo or cultured in vitro are also encompassed.

[0327] Therapeutic agent: Refers to one or more molecules or compounds that confer some beneficial effect upon administration to a subject. The beneficial therapeutic effect can include enablement of diagnostic determinations; amelioration of a disease, symptom, disorder, or pathological condition; reducing or preventing the onset of a disease, symptom, disorder or condition; and generally counteracting a disease, symptom, disorder or pathological condition.

[0328] Transduced, Transformed and Transfected: A virus or vector “transduces” a cell when it transfers nucleic acid molecules into a cell. A cell is “transformed” or “transfected” by a nucleic acid transduced into the cell when the nucleic acid becomes stably replicated by the cell, either by incorporation of the nucleic acid into the cellular genome, or by episomal replication.

[0329] These terms encompasses all techniques by which a nucleic acid molecule can be introduced into such a cell, including transfection with viral vectors, transformation with plasmid vectors, and introduction of naked DNA by electroporation, lipofection, particle gun acceleration and other methods in the art. In some example the method is a chemical method (e.g., calcium-phosphate transfection), physical method (e.g., electroporation, microinjection, particle bombardment), fusion (e.g., liposomes), receptor-mediated endocytosis (e.g., DNA-protein complexes, viral envelope/capsid-DNA complexes) and biological infection by viruses such as recombinant viruses (Wolff, J. A., ed, Gene Therapeutics, Birkhauser, Boston, USA, 1994). Methods for the introduction of nucleic acid molecules into cells are known (e.g., see U.S. Pat. No. 6,110,743). These methods can be used to transduce a cell with the disclosed agents to manipulate its genome.

[0330] Transgene: An exogenous gene.

[0331] Treating, Treatment, and Therapy: Any success or indicia of success in the attenuation or amelioration of an injury, pathology or condition, including any objective or subjective parameter such as abatement, remission, diminishing of symptoms or making the condition more tolerable to the patient, slowing in the rate of degeneration or decline, making the final point of degeneration less debilitating, improving a subject's physical or mental well-being, or prolonging the length of survival. The treatment may be assessed by objective or subjective parameters; including the results of a physical examination, blood and other clinical tests, and the like. For prophylactic benefit, the disclosed compositions may be administered to a subject at risk of developing a particular disease, condition, or symptom, or to a subject reporting one or more of the physiological symptoms of a disease, even though the disease, condition, or symptom may not have yet been manifested.

[0332] Upregulated: When used in reference to the expression of a molecule, such as a target RNA, refers to any process which results in an increase in production of the target RNA. In one example, includes direct upregulation, for example if the target RNA participates in a feedback loop with its own transcription. In one example, includes indirect upregulation, such as by knockdown of an inhibitory miRNA that leads to the activation of a target of that miRNA.

[0333] In some examples, the target RNA is a coding RNA. In some examples, the target RNA is non-coding RNA. Specific examples of RNA molecules that can be targeted for upregulation include mRNA, miRNA, rRNA, tRNA, nuclear RNA, and structural RNA. In some examples, upregulation or activation of a target RNA includes processes that increase translation of the target RNA and thus can increase the presence of corresponding proteins. The disclosed CRISPR/Cas system can be used to upregulate any target RNA of interest.

[0334] Upregulation includes any detectable increase in target RNA. In certain examples, detectable target RNA expression in a cell or cell free system (such as a cell expressing an Cas13d protein and gRNA disclosed herein) increases by at least 20%, at least 30%, at least 40%, at least 50%, at least 60%, at least 70%, at least 75%, at least 80%, at least 90%, at least 95%, at least 100%, at least 200%, at least 400%, or at least 500% as compared to a control (such an amount of target RNA detected in a corresponding normal cell or sample). In one example, a control is a relative amount of expression in a normal cell (e.g., a non-recombinant cell that does not include Cas13d or guide RNA).

[0335] Under conditions sufficient for: A phrase that is used to describe any environment that permits a desired activity. In one example the desired activity is expression of an Cas13d protein disclosed herein, in combination with other necessary elements, for example to modulate a target RNA.

[0336] Vector: A nucleic acid molecule into which a foreign nucleic acid molecule can be introduced without disrupting the ability of the vector to replicate and/or integrate in a host cell. Vectors include, but are not limited to, nucleic acid molecules that are single-stranded, double-stranded, or partially double-stranded; nucleic acid molecules that comprise one or more free ends, no free ends (e.g., circular); nucleic acid molecules that comprise DNA, RNA, or both; and other varieties of polynucleotides known in the art.

[0337] A vector can include nucleic acid sequences that permit it to replicate in a host cell, such as an origin of replication. A vector can also include one or more selectable marker genes and other genetic elements known in the art. An integrating vector is capable of integrating itself into a host nucleic acid. An expression vector is a vector that contains the necessary regulatory sequences to allow transcription and translation of inserted gene or genes.

[0338] One type of vector is a “plasmid,” which refers to a circular double stranded DNA loop into which additional DNA segments can be inserted, such as by standard molecular cloning techniques. Another type of vector is a viral vector, wherein virally-derived DNA or RNA sequences are present in the vector for packaging into a virus (e.g., retroviruses, replication defective retroviruses, adenoviruses, replication defective adenoviruses, and adeno-associated viruses). Viral vectors also include polynucleotides carried by a virus for transfection into a host cell. In some embodiments, the vector is a lentivirus (such as an integration-deficient lentiviral vector) or adeno-associated viral (AAV) vector.

[0339] Certain vectors are capable of autonomous replication in a host cell into which they are introduced (e.g., bacterial vectors having a bacterial origin of replication and episomal mammalian vectors). Other vectors (e.g., non-episomal mammalian vectors) are integrated into the genome of a host cell upon introduction into the host cell, and thereby are replicated along with the host genome.

[0340] Certain vectors are capable of directing the expression of genes to which they are operatively-linked. Such vectors are referred to herein as “expression vectors.” Common expression vectors are often in the form of plasmids. Recombinant expression vectors can comprise a nucleic acid provided herein (such as a guide RNA [which can be expressed from an RNA sequence or a RNA sequence], nucleic acid encoding an Cas13d protein) in a form suitable for expression of the nucleic acid in a host cell, which means that the recombinant expression vectors include one or more regulatory elements, which may be selected on the basis of the host cells to be used for expression, that is operatively-linked to the nucleic acid sequence to be expressed. Within a recombinant expression vector, “operably linked” is intended to mean that the nucleotide sequence of interest is linked to the regulatory element(s) in a manner that allows for expression of the nucleotide sequence (e.g., in an in vitro transcription/translation system or in a host cell when the vector is introduced into the host cell). It will be appreciated by those skilled in the art that the design of the expression vector can depend on such factors as the choice of the host cell to be transformed, the level of expression desired, etc. A vector can be introduced into host cells to thereby produce transcripts, proteins, or peptides, including fusion proteins or peptides, encoded by nucleic acids as described herein (e.g., clustered regularly interspersed short palindromic repeats (CRISPR) transcripts, proteins, enzymes, mutant forms thereof, fusion proteins thereof, etc.).

### II. Overview of Several Embodiments

[0341] Class 2 CRISPR-Cas systems endow microbes with diverse mechanisms for adaptive immunity. Provided herein is an analysis of prokaryotic genome and metagenome sequences to identify an uncharacterized family of RNA-guided, RNA-targeting CRISPR systems which is classified as Type VI-D. Biochemical characterization and protein engineering of seven distinct orthologs generated a ribonuclease effector derived from Ruminococcus flavefaciens XPD3002 (CasRx) with robust activity in human cells. CasRx-mediated knockdown exhibits high efficiency and specificity relative to RNA interference across diverse endogenous transcripts. As one of the most compact single effector Cas enzymes, CasRx can also be flexibly packaged into adeno-associated virus. Virally encoded, catalytically inactive CasRx can be targeted to cis-elements of pre-mRNA to manipulate alternative splicing, alleviating dysregulated tau isoform ratios in a neuronal model of frontotemporal dementia. The results herein present CasRx as a programmable RNA-binding module for efficient targeting of cellular RNA, enabling a general platform for transcriptome engineering and therapeutic methods.

[0342] Class 2 CRISPR systems are found throughout diverse bacterial and archaeal life. Using a minimal definition of the CRISPR locus for bioinformatic mining of prokaryotic genome and metagenome sequences, which requires only a CRISPR repeat array and a nearby protein, provided herein is the identification of an uncharacterized, remarkably compact family of RNA-targeting class 2 CRISPR systems designated as Type VI CRISPR-Cas13d.

[0343] Because CRISPR systems generally exist as a functional operon within 20 kilobases of genome sequence, even fragmented metagenome reads may be sufficient to recover useful Cas enzymes for bioengineering purposes. CRISPR genome mining strategies described herein and by others (Shmakov et al., 2015), combined with ongoing efforts to profile microbial populations via next-generation sequencing, should contribute mechanistically diverse additions to the genome engineering toolbox.

[0344] Two distinct ribonuclease properties of the Cas13d effector, which processes a CRISPR repeat array into mature guides via a HEPN domain-independent mechanism followed by guide sequence-dependent recognition of a complementary activator RNA, were biochemically characterized. This triggers HEPN-mediated RNase activity, enabling Cas13d to cleave both activator and bystander RNAs, a property shared by other RNA-targeting CRISPR systems. Cas13d additionally exhibits no apparent flanking sequence requirements and was found to be active across crRNAs tiling a target RNA, suggesting the ability to target arbitrary single-stranded RNA sequences.

[0345] A comprehensive activity reporter screen in human cells of Cas13d orthologs sampled from distinct branches of the Cas13d family revealed that NLS fusions to Cas13d from Ruminococcus flavefaciens strain XPD3002 (CasRx) can be engineered for programmable RNA targeting in a eukaryotic context (FIG. 8D). CasRx fusions knocked down a diverse set of 14 endogenous mRNAs and lncRNAs, consistently achieving >90% knockdown with favorable efficiency relative to RNA interference, dCas9-mediated CRISPR interference, and other members of the Cas13 superfamily (FIGS. 10A-10C). Additionally, CasRx interference is markedly more specific than spacer-matching shRNAs, with no detectable off-target changes compared with hundreds for RNA interference.

[0346] CasRx is a minimal two-component platform, including an engineered CRISPR-Cas13d effector and an associated guide RNA, and can be fully genetically encoded. Because CasRx is an orthogonally delivered protein, HEPN-inactive dCasRx can be engineered as a flexible RNA-binding module to target specific RNA elements. Importantly, because CasRx uses a distinct ribonuclease activity to process guide RNAs, dCasRx can still be paired with a repeat array for multiplexing applications. The utility of this concept is shown herein by creating a dCasRx splice effector fusion for tuning alternative splicing and resulting protein isoform ratios, applying it in a neuronal model of frontotemporal dementia.

[0347] At an average size of 930 aa, Cas13d is the smallest class 2 CRISPR effector characterized in mammalian cells. This allows CasRx effector domain fusions to be paired with a CRISPR array encoding multiple guide RNAs while remaining under the packaging size limit of the versatile adeno-associated virus (AAV) delivery vehicle (Naldini, 2015) for primary cell and in vivo delivery. Further, targeted AAV delivery of CasRx to specific postmitotic cell types such as neurons can mediate long-term expression of a corrective payload that avoids permanent genetic modifications or frequent re-administration (Chiriboga et al., 2016), complementing other nucleic acid targeting technologies such as DNA nuclease editing or antisense oligonucleotides. RNA mis-splicing diseases have been estimated to account for up to 15% of genetic diseases (Hammond and Wood, 2011), highlighting the potential for engineered splice effectors capable of multiplexed targeting. The materials provided herein can be used for RNA targeting for knockdown and splicing, such as live cell labeling and genetic screens to transcript imaging, trafficking, or regulation. CRISPR-Cas13d and engineered variants such as CasRx collectively enable flexible nucleic acid engineering, transcriptome-related study, and therapeutics, expanding the genome editing toolbox beyond DNA to RNA.

[0348] Provided herein are methods of targeting (e.g., modifying, detecting) one or more target RNA molecules, such as a clustered regularly interspaced short palindromic repeats (CRISPR)-CRISPR associated (Cas) system-mediated RNA editing method. Such methods can include contacting one or more target RNA molecules with a non-naturally occurring or engineered (e.g., does not naturally occur in the cell or system into which it is introduced) CRISPR-Cas system. Thus in some examples, the disclosed CRISPR-Cas system includes a naturally occurring Cas13d protein (or coding sequence) and a naturally occurring gRNA, but is used in a system or cell in which the Cas1 protein (or coding sequence) and the gRNA are not naturally found. Furthermore, the spacer sequence within the gRNA molecule is not naturally occurring, and has been modified to be complementary to the target RNA molecule.

[0349] In some examples, a target RNA is a coding RNA. In some examples, the RNA is non-coding RNA.

[0350] The disclosed CRISPR-Cas system can include (1) at least one Cas13d protein or at least one Cas13d nucleic acid coding sequence (such as a mRNA or a vector encoding the at least one Cas13d protein) and (2) at least one CRISPR-Cas system guide nucleic acid molecule (e.g., gRNA) (or at least one nucleic acid molecule encoding the gRNA) having sufficient complementary to a target RNA such that it can hybridize to a target RNA molecule. The Cas13d protein forms a complex with the gRNA, and the gRNA directs the complex to the one or more target RNA molecules. This targeting can allow the Cas13d-gRNA complex to modify or detect the one or more target RNA molecules. In some examples, the one or more target RNA molecules (or a cell containing the one or more target RNA molecules) are contacted with a complex comprising the at least one Cas13d protein and the at least one gRNA. In some examples, the system includes Mg²⁺. However, in some examples, the system does not require Mg²⁺, such as if cleavage of the target RNA is not desired.

[0351] In some examples, contacting the one or more target RNA molecules with the non-naturally occurring or engineered CRISPR-Cas system includes introducing into a cell (such as a eukaryotic or prokaryotic cell) containing the one or more target RNA molecules the non-naturally occurring or engineered CRISPR-Cas system, for example using endocytosis (e.g., receptor-mediated endocytosis, micropinocytosis), a liposome, a particle, an exosome, a microvesicle, a gene gun, electroporation, a virus, RNP-antibody fusion (e.g., by tethering an Cas13d RNP to an antibody, antibody fragment, or other targeting moiety [such as ScFv, aptamers, DARPins, nanobodies, affibodies, etc.], the RNP can be endocytosed into the cell, The RNP could conceivably be tethered to many things other than), or combinations thereof. Thus, cells can be transformed, transduced, transfected, or otherwise contacted with appropriate nucleic acid molecules of the disclosed CRISPR-Cas system. The resulting cells are recombinant cells. In some examples, contacting the one or more target RNA molecules with the non-naturally occurring or engineered CRISPR-Cas system includes contacting a cell-free system (such as a biological or environmental sample, or a cell lysate) containing the one or more target RNA molecules the non-naturally occurring or engineered CRISPR-Cas system (for example in a diagnostic method to detect a target RNA).

[0352] In some examples, at least 2, at least 3, at least 4, at least 5, at least 10, or at least 20 different gRNAs are used. For example, such a method could include targeting at least 2, at least 3, at least 4, at least 5, at least 10, or at least 20 different target RNA molecules, targeting at least 2, at least 3, at least 4, at least 5, at least 10, or at least 20 different regions of one or more RNA molecules, or combinations thereof.

[0353] Also provided are isolated nucleic acid molecules encoding such Cas13d proteins, such as a cDNA, genomic DNA, RNA, or mDNA. Such isolated nucleic acid molecules can be part of a vector (such as a plasmid or viral vector), and can be operably linked to a promoter. In some examples, an isolated nucleic acid molecule encoding a Cas13d protein has at least 80%, at least 85%, at least 90%, at least 92%, at least 95%, at least 96%, at least 97%, at least 98%, at least 99%, or 100% sequence identity to SEQ ID NO: 124, 125, 126, 127, 128, 139, 140 or 141; or at least 80%, at least 85%, at least 90%, at least 92%, at least 95%, at least 96%, at least 97%, at least 98%, at least 99%, or 100% sequence identity to SEQ ID NO: 114, 115, 116, 117, 118, 119, 120, 121, 122, 123, 142, 143, 144, or 145. In an additional example, an isolated nucleic acid encodes a Cas13d protein having at least 85%, at least 90%, at least 92%, at least 95%, at least 96%, at least 97%, at least 98%, at least 99%, or 100% sequence identity to SEQ ID NO: 1, 2, 3, 4, 5, 6, 7, 8, 9, 10, 11, 12, 13, 14, 15, 16, 17, 18, 19, 20, 21, 22, 23, 24, 25, 26, 27, 28, 29, 30, 31, 32, 33, 34, 35, 36, 37, 38, 39, 40, 41, 42, 43, 44, 45, 46, 47, 48, 49, 50, 51, 52, 53, 54, 55, 56, 57, 58, 59, 60, 61, 62, 63, 64, 65, 66, 67, 68, 69, 70, 71, 72, 73, 74, 75, 76, 77, 78, 79, 80, 81, 82, 83, 84, 85, 86, 87, 88, 89, 90, 91, 92, 93, 94, 95, 96, 97, 98, 99, 100, 101, 102, 103, 104, 105, 106, 107, 108, 109, 110, 111, 112, 113, 138, 147, 149, 153, 155, 158, 160, 162, 164, 166, 168, 170, 175, 177, 179, 181, 183, 185, 187, 189, 194, 198, 200, 202, 204, 206, 208, 210, 212, 214, 216, 218, 220, 222, 224, 226, 229, 231, 233, 235, 237, 239, 241, 243, 245, 247, 249, 251, or 253.

[0354] In some examples, an isolated nucleic acid molecule encoding at least one Cas13d protein (which can be part of a vector) includes at least one Cas13d protein coding sequence that is codon optimized for expression in a eukaryotic cell, at least one Cas13d protein coding sequence codon optimized for expression in a human cell. In one example, such an Cas13d coding sequence has at least 80%, at least 85%, at least 90%, at least 92%, at least 95%, at least 96%, at least 97%, at least 98%, at least 99%, or 100% sequence identity to SEQ ID NO: 114, 115, 116, 117, 118, 119, 120, 121, 122, 123, 142, 143, 144, or 145, or has at least 80%, at least 85%, at least 90%, at least 92%, at least 95%, at least 96%, at least 97%, at least 98%, at least 99%, or 100% sequence identity to SEQ ID NO: 124, 125, 126, 127, 128, 139, 140 or 141. In an additional example, a eukaryotic cell codon optimized nucleic acid sequence encodes a Cas13d protein having at least 85%, at least 90%, at least 92%, at least 95%, at least 96%, at least 97%, at least 98%, at least 99%, or 100% sequence identity to SEQ ID NO: 1, 2, 3, 4, 5, 6, 7, 8, 9, 10, 11, 12, 13, 14, 15, 16, 17, 18, 19, 20, 21, 22, 23, 24, 25, 26, 27, 28, 29, 30, 31, 32, 33, 34, 35, 36, 37, 38, 39, 40, 41, 42, 43, 44, 45, 46, 47, 48, 49, 50, 51, 52, 53, 54, 55, 56, 57, 58, 59, 60, 61, 62, 63, 64, 65, 66, 67, 68, 69, 70, 71, 72, 73, 74, 75, 76, 77, 78, 79, 80, 81, 82, 83, 84, 85, 86, 87, 88, 89, 90, 91, 92, 93, 94, 95, 96, 97, 98, 99, 100, 101, 102, 103, 104, 105, 106, 107, 108, 109, 110, 111, 112, 113, 138, 147, 149, 153, 155, 158, 160, 162, 164, 166, 168, 170, 175, 177, 179, 181, 183, 185, 187, 189, 194, 198, 200, 202, 204, 206, 208, 210, 212, 214, 216, 218, 220, 222, 224, 226, 229, 231, 233, 235, 237, 239, 241, 243, 245, 247, 249, 251, or 253.

[0355] In some examples, the gRNA that hybridizes with the one or more target RNA molecules includes one or more direct repeat (DR) sequences, one or more spacer sequences, or one or more sequences comprising DR-spacer-DR-spacer. In some examples, the one or more DR sequences have at least 80%, at least 85%, at least 90%, at least 92%, at least 95%, at least 96%, at least 97%, at least 98%, at least 99%, or 100% sequence identity to SEQ ID NO: 129, 130, 131, 132, 133, 134, 135, 136, 137, 148, 150, 151, 152, 154, 156, 157, 159, 161, 163, 165, 167, 169, 176, 178, 180, 182, 184, 186, 188, 190, 191, 192, 193, 199, 201, 203, 205, 207, 209, 211, 213, 215, 217, 219, 221, 223, 225, 227, 228, 230, 232, 234, 236, 238, 240, 242, 244, 246, 248, 250, 252, or 254. In one example, the gRNA includes additional sequences, such as an aptamer sequence.

[0356] In some examples, a plurality of gRNAs are processed from a single array transcript, wherein each gRNA can be different, for example to target different RNAs or target multiple regions of a single RNA.

[0357] In some examples, the DRs are truncated by 1-10 nucleotides (such as 1, 2, 3, 4, 5, 6, 7, 8, 9, or 10 nucleotides) at the 5′end, for example to be expressed as mature pre-processed guide RNAs.

[0358] Methods of targeting one or more target RNA molecules are provided. Targeting an RNA molecule can include one or more of cutting or nicking one or more target RNA molecules, activating or upregulating one or more target RNA molecules, activating or suppressing translation the one or more target RNA molecules, deactivating the one or more target RNA molecules, visualizing, labeling, or detecting the one or more target RNA molecules, binding the one or more target RNA molecules, editing the one or more target RNA molecules, trafficking the one or more target RNA molecules, and masking the one or more target RNA molecules. In some example, modifying one or more target RNA molecules includes one or more of an RNA base substitution, an RNA base deletion, an RNA base insertion, a break in the target RNA, methylating RNA, and demethylating RNA.

[0359] In some examples, such methods are used to treat a disease, such as a disease in a human. In such examples, the one or more target RNA molecules is associated with the disease

[0360] Also provided are isolated proteins, including non-naturally occurring proteins. in some examples, a protein has at least 80%, at least 85%, at least 90%, at least 92%, at least 95%, at least 96%, at least 97%, at least 98%, at least 99%, or 100% sequence identity to SEQ ID NO: 1, 2, 3, 4, 5, 6, 7, 8, 9, 10, 11, 12, 13, 14, 15, 16, 17, 18, 19, 20, 21, 22, 23, 24, 25, 26, 27, 28, 29, 30, 31, 32, 33, 34, 35, 36, 37, 38, 39, 40, 41, 42, 43, 44, 45, 46, 47, 48, 49, 50, 51, 52, 53, 54, 55, 56, 57, 58, 59, 60, 61, 62, 63, 64, 65, 66, 67, 68, 69, 70, 71, 72, 73, 74, 75, 76, 77, 78, 79, 80, 81, 82, 83, 84, 85, 86, 87, 88, 89, 90, 91, 92, 93, 94, 95, 96, 97, 98, 99, 100, 101, 102, 103, 104, 105, 106, 107, 108, 109, 110, 111, 112, 113, 138, 147, 149, 153, 155, 158, 160, 162, 164, 166, 168, 170, 175, 177, 179, 181, 183, 185, 187, 189, 194, 198, 200, 202, 204, 206, 208, 210, 212, 214, 216, 218, 220, 222, 224, 226, 229, 231, 233, 235, 237, 239, 241, 243, 245, 247, 249, 251, or 253. In some examples, an isolated protein is an Cas13d ortholog from a prokaryotic genome or metagenome, gut metagenome, an activated sludge metagenome, an anaerobic digester metagenome, a chicken gut metagenome, a human gut metagenome, a pig gut metagenome, a bovine gut metagenome, a sheep gut metagenome, a goat gut metagenome, a capybara gut metagenome, a primate gut metagenome, a termite gut metagenome, a fecal metagenome, a genome from the Order Clostridiales, or the Family Ruminococcaceae. In some examples, an Cas13d ortholog includes an Cas13d ortholog from Ruminococcus albus, Eubacterium siraeum, a Ruminococcus flavefaciens strain XPD3002, Ruminococcus flavefaciens FD-1, uncultured Eubacterium sp TS28-c4095, uncultured Ruminococcus sp., Ruminococcus bicirculans, or Ruminococcus sp CAG57. Such proteins can include a subcellular localization signal. In some examples, such proteins include a mutation in at least one native HEPN domain.

[0361] Also provided are isolated guide RNA (gRNA) molecules. In some examples, an isolated gRNA includes one or more direct repeat (DR) sequences, such as one having at least 80%, at least 85%, at least 90%, at least 92%, at least 95%, at least 96%, at least 97%, at least 98%, at least 99%, or 100% sequence identity to SEQ ID NO: 129, 130, 131, 132, 133, 134, 135, 136, 137, 148, 150, 151, 152, 154, 156, 157, 159, 161, 163, 165, 167, 169, 176, 178, 180, 182, 184, 186, 188, 190, 191, 192, 193, 199, 201, 203, 205, 207, 209, 211, 213, 215, 217, 219, 221, 223, 225, 227, 228, 230, 232, 234, 236, 238, 240, 242, 244, 246, 248, 250, 252, or 254. Such a gRNA can further include one or more spacer sequences specific for (e.g., is complementary to) the target RNA. Such guide RNAs can further be optionally truncated by 1-10 nucleotides (such as 1, 2, 3, 4, 5, 6, 7, 8, 9, or 10 nucleotides) at the 5′end of the DR, for example to generate pre-processed guide RNAs.

[0362] Also provided are ribonucleoprotein (RNP) complexes, which include one or more Cas13d proteins provided herein and one or more gRNAs provided herein.

[0363] Also provided are recombinant cells that include any Cas13d protein (or nucleic acid molecule encoding Cas13d), any gRNA, any RNP complex, or any vector, provided herein. In one example, the cell is not a bacterial cell. In one example, the cell is a bacterial cell.

[0364] Also provided are compositions that include one or more of any Cas13d protein (or nucleic acid molecule encoding Cas13d), any gRNA or array, any RNP complex, any isolated nucleic acid molecule, any vector, or any cell, provided herein. Such compositions can include a pharmaceutically acceptable carrier.

[0365] Also provided are kits. Such kits can include one or more of any Cas13d protein (or nucleic acid molecule encoding Cas13d), any gRNA or array, any RNP complex, any isolated nucleic acid molecule, any vector, any cell, or any composition provided herein. Such reagents can be combined or in separate containers.

[0366] In some examples, a Cas13d protein is programmed toward its RNA target by combining the protein (or nucleic acid encoding the protein) with an engineered RNA guide (or nucleic acid encoding RNA guide) consisting of a full or partial direct repeat sequence followed by a “spacer” sequence complementary to the RNA target(s) (or variations thereof, i.e. arrays (DR-spacer-DR-spacer-DR-spacer.etc.) or pre-guide RNAs (DR-spacer-DR). Cas13d Proteins can be catalytically inactivated and transformed into RNA binding modules by mutating the conserved RNAse HEPN motif (RXXXXH). Exemplary Cas13d proteins and corresponding guides are provided herein (e.g., SEQ ID NOS: 147-170, 175-193 and SEQ ID NOS: 198-254).

[0367] A. Cas13d Proteins

[0368] Provided herein are novel Cas13d proteins, such as those as shown in in the sequence listing. SEQ ID NOS: 1, 3, 42, 62, 70, 82, 83, 92, 147, 149, 153, 155, 158, 160, 162, 164, 166, 168, 170, 175, 177, 179, 181, 183, 185, 187, 189, 198, 200, 202, 204, 206, 208, 210, 212, 214, 216, 218, 220, 222, 224, 226, 229, 231, 233, 235, 237, 239, 241, 243, 245, 247, 249, 251, and 253 provide distinct full length proteins, and SEQ ID NOS: 2, 4-41, 43-61, 63-69, 71-81, 84-91, and 93-113 and 194 provide Cas13d variants and fragments. Such proteins can be used in the disclosed methods, compositions, and kits.

[0369] In some examples, an Cas13d protein includes one or more (such as 1 or 2) native HEPN domains. In some examples, an Cas13d protein includes one or more mutated HEPN domains (such as mutant Cas13d protein can process the gRNA, but cannot modify the target RNA). In some examples, an Cas13d protein is no more than 150 kD, no more than 140 kD, no more than 130 kD, no more than 120 kD, such as about 90 to 120 kD, about 100 to 120 kD or about 110 kD.

[0370] In addition to the Cas13d proteins provided in Table 1 and in Example 2, the disclosure encompasses Cas13d orthologs from a prokaryotic genome or metagenome, gut metagenome, an activated sludge metagenome, an anaerobic digester metagenome, a chicken gut metagenome, a human gut metagenome, a pig gut metagenome, a bovine gut metagenome, a sheep gut metagenome, a goat gut metagenome, a capybara gut metagenome, a primate gut metagenome, a termite gut metagenome, a fecal metagenome, a genome from the Order Clostridiales, or the Family Ruminococcaceae, such as an Cas13d ortholog from Ruminococcus albus, Eubacterium siraeum, a Ruminococcus flavefaciens strain XPD3002, Ruminococcus flavefaciens FD-1, uncultured Eubacterium sp TS28-c4095, uncultured Ruminococcus sp., Ruminococcus bicirculans, or Ruminococcus sp CAG57.

[0371] In some examples, an Cas13d protein is at least 800 aa, at least 900 aa, or at least 1000 aa, such as 800 to 1200 aa, 850 to 1050 aa, or 860-1040 aa.

[0372] 1. Variant Cas13d Sequences

[0373] Cas13d proteins, including variants of the sequences provided herein (such as variants of SEQ ID NO: 1, 2, 3, 4, 5, 6, 7, 8, 9, 10, 11, 12, 13, 14, 15, 16, 17, 18, 19, 20, 21, 22, 23, 24, 25, 26, 27, 28, 29, 30, 31, 32, 33, 34, 35, 36, 37, 38, 39, 40, 41, 42, 43, 44, 45, 46, 47, 48, 49, 50, 51, 52, 53, 54, 55, 56, 57, 58, 59, 60, 61, 62, 63, 64, 65, 66, 67, 68, 69, 70, 71, 72, 73, 74, 75, 76, 77, 78, 79, 80, 81, 82, 83, 84, 85, 86, 87, 88, 89, 90, 91, 92, 93, 94, 95, 96, 97, 98, 99, 100, 101, 102, 103, 104, 105, 106, 107, 108, 109, 110, 111, 112, 113, 138, 147, 149, 153, 155, 158, 160, 162, 164, 166, 168, 170, 175, 177, 179, 181, 183, 185, 187, 189, 194, 198, 200, 202, 204, 206, 208, 210, 212, 214, 216, 218, 220, 222, 224, 226, 229, 231, 233, 235, 237, 239, 241, 243, 245, 247, 249, 251, or 253) are encompassed within this disclosure. In some examples, Cas13d proteins provided herein can contain one or more mutations, such as a single insertion, a single deletion, a single substitution, or combinations thereof. In some examples, the Cas13d protein includes at least 1, at least 5, at least 10, at least 15, at least 20, at least 25, at least 30, at least 40, at least 50, at least 75, at least 100, at least 200 or at least 300 aa insertions, such as 1-20 insertions (for example at the N- or C-terminus or within the protein, such as insertion of a whole small domain), at least 1, at least 5, at least 10, at least 15, at least 20, at least 25, at least 30, at least 40, at least 50, at least 75, at least 100, at least 200 or at least 300 aa deletions (such as deletion of a whole small domain), such as 1-20 deletions (for example at the N- or C-terminus or within the protein), at least 1, at least 5, at least 10, at least 15, at least 20, at least 25, at least 30 aa substitutions, such as 1-20 substitutions, or any combination thereof (e.g., single insertion together with 1-19 substitutions), but retain the ability to bind target RNA molecules complementary to the spacer sequence within the gRNA molecule and/or process an guide array RNA transcript into gRNA molecules and/or retain the ability to cleave target RNA. In some examples, the disclosure provides a variant of any disclosed Cas13d protein (such as SEQ ID NO: 1, 2, 3, 4, 5, 6, 7, 8, 9, 10, 11, 12, 13, 14, 15, 16, 17, 18, 19, 20, 21, 22, 23, 24, 25, 26, 27, 28, 29, 30, 31, 32, 33, 34, 35, 36, 37, 38, 39, 40, 41, 42, 43, 44, 45, 46, 47, 48, 49, 50, 51, 52, 53, 54, 55, 56, 57, 58, 59, 60, 61, 62, 63, 64, 65, 66, 67, 68, 69, 70, 71, 72, 73, 74, 75, 76, 77, 78, 79, 80, 81, 82, 83, 84, 85, 86, 87, 88, 89, 90, 91, 92, 93, 94, 95, 96, 97, 98, 99, 100, 101, 102, 103, 104, 105, 106, 107, 108, 109, 110, 111, 112, 113, 138, 147, 149, 153, 155, 158, 160, 162, 164, 166, 168, 170, 175, 177, 179, 181, 183, 185, 187, 189, 194, 198, 200, 202, 204, 206, 208, 210, 212, 214, 216, 218, 220, 222, 224, 226, 229, 231, 233, 235, 237, 239, 241, 243, 245, 247, 249, 251, or 253) having 1, 2, 3, 4, 5, 6, 7, 8, 9, 10, 11, 12, 13, 14, 15, 16, 17, 18, 19, 20, 21, 22, 23, 24, 25, 26, 27, 28, 29 or 30 amino acid changes, but retain the ability to bind target RNA molecules complementary to the spacer sequence within the gRNA molecule and/or process an guide array RNA transcript into gRNA molecules. In some examples, any disclosed Cas13d protein (such as SEQ ID NO: 1, 2, 3, 4, 5, 6, 7, 8, 9, 10, 11, 12, 13, 14, 15, 16, 17, 18, 19, 20, 21, 22, 23, 24, 25, 26, 27, 28, 29, 30, 31, 32, 33, 34, 35, 36, 37, 38, 39, 40, 41, 42, 43, 44, 45, 46, 47, 48, 49, 50, 51, 52, 53, 54, 55, 56, 57, 58, 59, 60, 61, 62, 63, 64, 65, 66, 67, 68, 69, 70, 71, 72, 73, 74, 75, 76, 77, 78, 79, 80, 81, 82, 83, 84, 85, 86, 87, 88, 89, 90, 91, 92, 93, 94, 95, 96, 97, 98, 99, 100, 101, 102, 103, 104, 105, 106, 107, 108, 109, 110, 111, 112, 113, 138, 147, 149, 153, 155, 158, 160, 162, 164, 166, 168, 170, 175, 177, 179, 181, 183, 185, 187, 189, 194, 198, 200, 202, 204, 206, 208, 210, 212, 214, 216, 218, 220, 222, 224, 226, 229, 231, 233, 235, 237, 239, 241, 243, 245, 247, 249, 251, or 253) further includes 1-8 amino acid insertions, 1-15 amino acid deletions, 1-10 amino acid substitutions, or any combination thereof (e.g., 1-15, 1-4, or 1-5 amino acid deletions together with 1-10, 1-5 or 1-7 amino acid substitutions), with the retained ability to bind target RNA molecules complementary to the spacer sequence within the gRNA molecule and/or process an guide array RNA transcript into gRNA molecules. In one example, such variant peptides are produced by manipulating the nucleotide sequence encoding a peptide using standard procedures such as site-directed mutagenesis or PCR. Such variants can also be chemically synthesized.

[0374] In some examples, an Cas13d protein includes a motif shown in SEQ ID NO: 195, 196 or 197. Thus, an Cas13d protein having at least 80%, at least 85%, at least 90%, at least 92%, at least 95%, at least 96%, at least 97%, at least 98%, at least 99%, or 100% sequence identity to SEQ ID NO: 1, 2, 3, 4, 5, 6, 7, 8, 9, 10, 11, 12, 13, 14, 15, 16, 17, 18, 19, 20, 21, 22, 23, 24, 25, 26, 27, 28, 29, 30, 31, 32, 33, 34, 35, 36, 37, 38, 39, 40, 41, 42, 43, 44, 45, 46, 47, 48, 49, 50, 51, 52, 53, 54, 55, 56, 57, 58, 59, 60, 61, 62, 63, 64, 65, 66, 67, 68, 69, 70, 71, 72, 73, 74, 75, 76, 77, 78, 79, 80, 81, 82, 83, 84, 85, 86, 87, 88, 89, 90, 91, 92, 93, 94, 95, 96, 97, 98, 99, 100, 101, 102, 103, 104, 105, 106, 107, 108, 109, 110, 111, 112, 113, 138, 147, 149, 153, 155, 158, 160, 162, 164, 166, 168, 170, 175, 177, 179, 181, 183, 185, 187, 189, 194, 198, 200, 202, 204, 206, 208, 210, 212, 214, 216, 218, 220, 222, 224, 226, 229, 231, 233, 235, 237, 239, 241, 243, 245, 247, 249, 251, or 253, in some examples includes at least one motif shown in SEQ ID NO: 195, 196 or 197.

[0375] One type of modification or mutation includes the substitution of amino acids for amino acid residues having a similar biochemical property, that is, a conservative substitution (such as 1-4, 1-8, 1-10, or 1-20 conservative substitutions). Typically, conservative substitutions have little to no impact on the activity of a resulting peptide. For example, a conservative substitution is an amino acid substitution in an Cas13d protein (such as SEQ ID NO: 1, 2, 3, 4, 5, 6, 7, 8, 9, 10, 11, 12, 13, 14, 15, 16, 17, 18, 19, 20, 21, 22, 23, 24, 25, 26, 27, 28, 29, 30, 31, 32, 33, 34, 35, 36, 37, 38, 39, 40, 41, 42, 43, 44, 45, 46, 47, 48, 49, 50, 51, 52, 53, 54, 55, 56, 57, 58, 59, 60, 61, 62, 63, 64, 65, 66, 67, 68, 69, 70, 71, 72, 73, 74, 75, 76, 77, 78, 79, 80, 81, 82, 83, 84, 85, 86, 87, 88, 89, 90, 91, 92, 93, 94, 95, 96, 97, 98, 99, 100, 101, 102, 103, 104, 105, 106, 107, 108, 109, 110, 111, 112, 113, 138, 147, 149, 153, 155, 158, 160, 162, 164, 166, 168, 170, 175, 177, 179, 181, 183, 185, 187, 189, 194, 198, 200, 202, 204, 206, 208, 210, 212, 214, 216, 218, 220, 222, 224, 226, 229, 231, 233, 235, 237, 239, 241, 243, 245, 247, 249, 251, or 253) that does not substantially affect the ability of the Cas13d protein to bind target RNA molecules complementary to the spacer sequence within the gRNA molecule and/or process an guide array RNA transcript into gRNA molecules. An alanine scan can be used to identify which amino acid residues in an Cas13d protein (such as SEQ ID NO: 1, 2, 3, 4, 5, 6, 7, 8, 9, 10, 11, 12, 13, 14, 15, 16, 17, 18, 19, 20, 21, 22, 23, 24, 25, 26, 27, 28, 29, 30, 31, 32, 33, 34, 35, 36, 37, 38, 39, 40, 41, 42, 43, 44, 45, 46, 47, 48, 49, 50, 51, 52, 53, 54, 55, 56, 57, 58, 59, 60, 61, 62, 63, 64, 65, 66, 67, 68, 69, 70, 71, 72, 73, 74, 75, 76, 77, 78, 79, 80, 81, 82, 83, 84, 85, 86, 87, 88, 89, 90, 91, 92, 93, 94, 95, 96, 97, 98, 99, 100, 101, 102, 103, 104, 105, 106, 107, 108, 109, 110, 111, 112, 113, 138, 147, 149, 153, 155, 158, 160, 162, 164, 166, 168, 170, 175, 177, 179, 181, 183, 185, 187, 189, 194, 198, 200, 202, 204, 206, 208, 210, 212, 214, 216, 218, 220, 222, 224, 226, 229, 231, 233, 235, 237, 239, 241, 243, 245, 247, 249, 251, or 253), can tolerate an amino acid substitution. In one example, the ability of a variant Cas13d protein (such as 1, 2, 3, 4, 5, 6, 7, 8, 9, 10, 11, 12, 13, 14, 15, 16, 17, 18, 19, 20, 21, 22, 23, 24, 25, 26, 27, 28, 29, 30, 31, 32, 33, 34, 35, 36, 37, 38, 39, 40, 41, 42, 43, 44, 45, 46, 47, 48, 49, 50, 51, 52, 53, 54, 55, 56, 57, 58, 59, 60, 61, 62, 63, 64, 65, 66, 67, 68, 69, 70, 71, 72, 73, 74, 75, 76, 77, 78, 79, 80, 81, 82, 83, 84, 85, 86, 87, 88, 89, 90, 91, 92, 93, 94, 95, 96, 97, 98, 99, 100, 101, 102, 103, 104, 105, 106, 107, 108, 109, 110, 111, 112, 113, 138, 147, 149, 153, 155, 158, 160, 162, 164, 166, 168, 170, 175, 177, 179, 181, 183, 185, 187, 189, 194, 198, 200, 202, 204, 206, 208, 210, 212, 214, 216, 218, 220, 222, 224, 226, 229, 231, 233, 235, 237, 239, 241, 243, 245, 247, 249, 251, or 253) to modify gene expression in a CRISPR/Cas system, is not altered by more than 25%, for example not more than 20%, for example not more than 10%, when an alanine, or other conservative amino acid, is substituted for 1-4, 1-8, 1-10, or 1-20 native amino acids. Examples of amino acids which may be substituted for an original amino acid in a protein and which are regarded as conservative substitutions include: Ser for Ala; Lys for Arg; Gln or His for Asn; Glu for Asp; Ser for Cys; Asn for Gln; Asp for Glu; Pro for Gly; Asn or Gln for His; Leu or Val for Ile; Ile or Val for Leu; Arg or Gln for Lys; Leu or Ile for Met; Met, Leu or Tyr for Phe; Thr for Ser; Ser for Thr; Tyr for Trp; Trp or Phe for Tyr; and Ile or Leu for Val.

[0376] One method for identifying regions particularly amenable to insertions, substitutions or deletion is to target stretches of amino acids exhibiting low levels of conservation between orthologs. Such regions are indicated in the conservation graph of the alignment of Cas13d proteins provided in FIG. 1B. Conserved residues of Cas13d are further marked in the Cas13d protein alignment provided in FIG. 18A-18MMM (indicated by symbols “.” “:” or “*” below aligned conserved residues). Examples of deletions and their functional testing are further provided in FIGS. 16A-16B.

[0377] Another type of substitution can be achieved by swapping out parts of one ortholog with the homologous region of another ortholog to obtain a combined “chimeric” protein. Such a chimeric protein may combine favorable properties of multiple Cas13d orthologs.

[0378] More substantial changes can be made by using substitutions that are less conservative, e.g., selecting residues that differ more significantly in their effect on maintaining: (a) the structure of the polypeptide backbone in the area of the substitution, for example, as a sheet or helical conformation; (b) the charge or hydrophobicity of the polypeptide at the target site; or (c) the bulk of the side chain. The substitutions that in general are expected to produce the greatest changes in polypeptide function are those in which: (a) a hydrophilic residue, e.g., serine or threonine, is substituted for (or by) a hydrophobic residue, e.g., leucine, isoleucine, phenylalanine, valine or alanine; (b) a cysteine or proline is substituted for (or by) any other residue; (c) a residue having an electropositive side chain, e.g., lysine, arginine, or histidine, is substituted for (or by) an electronegative residue, e.g., glutamic acid or aspartic acid; or (d) a residue having a bulky side chain, e.g., phenylalanine, is substituted for (or by) one not having a side chain, e.g., glycine.

[0379] Thus, the disclosure provides Cas13d proteins having at least 80%, at least 85%, at least 90%, at least 92%, at least 95%, at least 96%, at least 97%, at least 98%, at least 99%, or 100% sequence identity to SEQ ID NO: 1, 2, 3, 4, 5, 6, 7, 8, 9, 10, 11, 12, 13, 14, 15, 16, 17, 18, 19, 20, 21, 22, 23, 24, 25, 26, 27, 28, 29, 30, 31, 32, 33, 34, 35, 36, 37, 38, 39, 40, 41, 42, 43, 44, 45, 46, 47, 48, 49, 50, 51, 52, 53, 54, 55, 56, 57, 58, 59, 60, 61, 62, 63, 64, 65, 66, 67, 68, 69, 70, 71, 72, 73, 74, 75, 76, 77, 78, 79, 80, 81, 82, 83, 84, 85, 86, 87, 88, 89, 90, 91, 92, 93, 94, 95, 96, 97, 98, 99, 100, 101, 102, 103, 104, 105, 106, 107, 108, 109, 110, 111, 112, 113, 138, 147, 149, 153, 155, 158, 160, 162, 164, 166, 168, 170, 175, 177, 179, 181, 183, 185, 187, 189, 194, 198, 200, 202, 204, 206, 208, 210, 212, 214, 216, 218, 220, 222, 224, 226, 229, 231, 233, 235, 237, 239, 241, 243, 245, 247, 249, 251, or 253 or combinations (e.g., chimeras) thereof.

[0380] In one example, an Cas13d protein includes non-naturally occurring amino acids.

[0381] 2. Cas13d Proteins with Other Elements

[0382] An Cas13d protein (such as any of SEQ ID NOS: 1, 2, 3, 4, 5, 6, 7, 8, 9, 10, 11, 12, 13, 14, 15, 16, 17, 18, 19, 20, 21, 22, 23, 24, 25, 26, 27, 28, 29, 30, 31, 32, 33, 34, 35, 36, 37, 38, 39, 40, 41, 42, 43, 44, 45, 46, 47, 48, 49, 50, 51, 52, 53, 54, 55, 56, 57, 58, 59, 60, 61, 62, 63, 64, 65, 66, 67, 68, 69, 70, 71, 72, 73, 74, 75, 76, 77, 78, 79, 80, 81, 82, 83, 84, 85, 86, 87, 88, 89, 90, 91, 92, 93, 94, 95, 96, 97, 98, 99, 100, 101, 102, 103, 104, 105, 106, 107, 108, 109, 110, 111, 112, 113, 138, 147, 149, 153, 155, 158, 160, 162, 164, 166, 168, 170, 175, 177, 179, 181, 183, 185, 187, 189, 194, 198, 200, 202, 204, 206, 208, 210, 212, 214, 216, 218, 220, 222, 224, 226, 229, 231, 233, 235, 237, 239, 241, 243, 245, 247, 249, 251, or 253) can include other elements or domains, for example at the N- or C-terminus (or both). The resulting protein can be referred to as an Cas13d fusion protein. In one example, an Cas13d protein provided herein (such as a native Cas13d or an Cas13d with mutated HEPN domain(s)) includes a subcellular localization signal. Exemplary subcellular localization signals include an organelle localization signal, such as a nuclear localization signal (NLS), nuclear export signal (NES), or mitochondrial localization signal. In one example, an Cas13d protein includes an NLS, such as SPKKKRKVEAS (SEQ ID NO: 256; e.g., encoded by AGCCCCAAGAAgAAGAGaAAGGTGGAGGCCAGC, SEQ ID NO: 257) or GPKKKRKVAAA (SV40 large T antigen NLS, SEQ ID NO: 258; e.g., encoded by ggacctaagaaaaagaggaaggtggcggccgct, SEQ ID NO: 260). Exemplary NES that can be part of an Cas13d protein include an adenovirus type 5 E1B nuclear export sequence, an HIV nuclear export sequence, a MAPK nuclear export sequence, or a PTK2 nuclear export sequence.

[0383] In some examples, the at least one Cas13d protein (such as a native Cas13d or an Cas13d with mutated HEPN domain(s)) further includes one or more effector domains. Exemplary effector domains include proteins and/or enzymes, such that those can cleave RNA (e.g., a PIN endonuclease domain, an NYN domain, an SMR domain from SOT1, or an RNase domain from Staphylococcal nuclease), those that can affect RNA stability (e.g., tristetraprolin (TTP) or domains from UPF1, EXOSC5, and STAU1), those that can edit a nucleotide or ribonucleotide (e.g., a cytidine deaminase, PPR protein, adenosine deaminase, ADAR family protein, or APOBEC family protein), those that can activate translation (e.g., eIF4E and other translation initiation factors, a domain of the yeast poly(A)-binding protein or GLD2), those that can repress translation (e.g., Pumilio or FBF PUF proteins, deadenylases, CAF1, Argonaute proteins), those that can methylate RNA (e.g., domains from m6A methyltransferase factors such as METTL14, METTL3, or WTAP), those that can demethylate RNA (e.g., human alkylation repair homolog 5 or Alkbh5), those that can affect splicing (e.g., the RS-rich domain of SRSF1, the Gly-rich domain of hnRNP A1, the alanine-rich motif of RBM4, or the proline-rich motif of DAZAP1), those that can enable affinity purification or immunoprecipitation (e.g., FLAG, HA, biotin, or HALO tags), and those that can enable proximity-based protein labeling and identification (e.g., a biotin ligase (such as BirA) or a peroxidase (such as APEX2) in order to biotinylate proteins that interact with the target RNA).

[0384] In some examples, the Cas13d protein and effector module combination can constitute a transcriptional sensor. For example, the transcriptional sensor can be comprised of at least one Cas13d protein with a mutated HEPN domain (e.g., SEQ ID NO: 2 or 4), at least one gRNA containing at least one spacer sequence specific for the target RNA, and an effector module such as an optionally split fluorescent protein or probe (e.g., a split Venus fluorescent protein, a split GFP, a split enhanced GFP, a split mCherry, a split super-folder mCherry, and other fluorescent protein variants such as ECFP, YFP, RFP, and derivatives or fragments thereof); an optionally split luminescent protein or probe (e.g. Gaussia, Firefly, NanoLuc, or Renilla variants); an optionally split enzyme (e.g., ubiquitin or TEV protease); a FRET-compatible protein pair; one or more transcription factor(s) fused to Cas13d via cleavable linkers (e.g., an artificial GAL4, zinc finger, transcriptional activator like effector (TALE), CRISPR-Cas9, CRISPR-Cpf1, or TetR-based transcription factor or an endogenous transcription factor); a split intein that trans-splices a protein to restore its function such as a transcription factor (e.g., an intein from Rhodothermus marinus or DnaE); a kinase-substrate pair that activates upon phosphorylation (e.g., TYK2-STAT3); one, two, or more monomers that activate upon dimerization or multimerization (e.g., caspase 9); or one or more proteins that induce conformational and functional change upon interaction. In one example, the spatial proximity of two or more Cas13d proteins and gRNAs due to binding a particular transcript would activate the effector module, resulting in a detectable signal or detectable activity in the cell.

[0385] In one example, the effector domain is fused to a protein that specifically recognizes and binds an RNA aptamer, such as one that can be appended to or inserted within a gRNA molecule (e.g., an MS2, PP7, Qβ, and other aptamers). This aptamer-effector domain fusion can be used to target the target RNA because the Cas13d and gRNA complex will guide the aptamer protein-effector domain in proximity to the target RNA.

[0386] In another example, the aptamer can be directly inserted into the gRNA molecule to permit detection of a target RNA, such as a fluorophore aptamer (e.g., Spinach, Mango, etc.).

[0387] In some examples, the Cas13d protein (such as a native Cas13d or an Cas13d with mutated HEPN domain(s)) includes a purification tag, such as an HA-tag, His-tag (such as 6-His), Myc-tag, E-tag, S-tag, calmodulin tag, FLAG-tag, GST-tag, MBP-tag, and the like. Such tags are in some examples at the N- or C-terminal end of the Cas13d protein.

[0388] In some examples, an Cas13d protein (such as a native Cas13d or an Cas13d with mutated HEPN domain(s)) includes one or more subcellular localization signals, effector domains, and purification tags.

[0389] In some examples, an Cas13d protein may be split into multiple fragments, which are then expressed individually. Such fragments of Cas13d may be optionally fused to other protein domains. In one example, an Cas13d can be split into two halves, which are then fused to two parts of an inducible heterodimer pair. Upon induction of heterodimer binding, the Cas13d halves are recruited to each other to form an active protein. Such a system would allow for the inducible control of Cas13d activity. Useful heterodimer pairs include two proteins that dimerize upon light illumination or through administration of a small molecule compound, amongst others. Specific examples of heterodimer pair include but are not limited to: light inducible Magnets proteins, the light inducible iLID-SspB pair, the light inducible Cryptochrome2-CIB1 dimer and the small molecule inducible FKBP protein. In another example of a split Cas13d design, two halved of the Cas13d protein may be fused to protein trans-splicing domains. Such a design would enable the separate expression of two halves which are reconstituted into a full length protein once expressed inside a cell. An example of such transsplicing domains includes the Intein system.

[0390] One method for identifying regions particularly amenable to splitting of the protein, is to identify stretches of amino acids exhibiting low levels of conservation between orthologs. Such regions are indicated in the conservation graph of the alignment of Cas13d proteins provided in FIG. 1B. Regions of conserved residues of Cas13d are further marked in the Cas13d protein alignment provided in FIG. 18A-18MMM (indicated by symbols . : or * below aligned conserved residues).

[0391] 3. Generation of Cas13d Proteins

[0392] In one example, the Cas13d protein is expressed in vitro, for example, in a prokaryotic cell (e.g., bacteria such as Lactobacillus, Lactococcus, Bacillus (such as B. subtilis), Escherichia (such as E. coli), Salmonella typhimurium, and Clostridium), archea cell, plant or plant cell, fungal cell (e.g., Neurospora), yeast cell (e.g., Saccharomyces or Pichia (such as S. cerevisiae or P. pastoris), Kluyveromyces lactis), insect cell (e.g., SF9 cells), or mammalian cells (e.g., 293 cells, or immortalized mammalian myeloid and lymphoid cell lines). Once expressed, the Cas13d protein can be isolated and/or purified (e.g., using chromatography or immunological separation). In some examples, as tag on the Cas13d protein permits isolation of the protein from a culture media. Exemplary procedures include ammonium sulfate precipitation, affinity columns, column chromatography, and the like (see, generally, R. Scopes, Protein Purification, Springer-Verlag, N.Y., 1982). Substantially pure compositions of at least about 90 to 95% homogeneity, such as 98% to 99% homogeneity, can be used in the methods provided herein. For example, a purified preparation of an Cas13d protein can be used as an alternative to expressing the Cas13d protein from a nucleic acid molecule in the CRISPR/Cas system.

[0393] In addition to recombinant methods, Cas13d proteins disclosed herein can also be constructed in whole or in part using native chemical ligation and/or expressed protein ligation.

[0394] B. Nucleic Acid Molecules Encoding Cas13d Proteins

[0395] Nucleic acid molecules encoding an Cas13d protein are encompassed by this disclosure. Nucleic acid molecules include DNA, genomic DNA, cDNA, mRNA, and RNA sequences which encode an Cas13d peptide. Such nucleic acid molecules can include naturally occurring or non-naturally occurring nucleotides or ribonucleotides. Exemplary nucleic acid molecules that encode the novel Cas13d proteins shown in SEQ ID NOS: 1, 3, 42, 62, 70, 82, 83, 92 and 104, are shown in SEQ ID NOS: 124-128, 139, 140, and 141. Also provided are codon optimized nucleic acid molecules that encode the novel Cas13d proteins, for example those optimized for expression in a mammalian cells, such as a human cell (SEQ ID NOS: 114-123 and 142-145). For example, SEQ ID NOS: 114, 118, and 122 provide nucleic acid molecules optimized for expression in human cells. SEQ ID NOS: 115, 119 and 123 provide nucleic acid molecules optimized for expression in human cells, and which encode for mutant HEPN sites. SEQ ID NOS: 116 and 120 provide nucleic acid molecules optimized for expression in human cells, and which includes an N-terminal nuclear localization (NLS) coding sequence (namely, SPKKKRKVEAS). SEQ ID NO: 117 and 121 provide nucleic acid molecules optimized for expression in human cells, and which include N-terminal and C-terminal NLS coding sequences (namely, SPKKKRKVEAS, SEQ ID NO: 256, and GPKKKRKVAAA SEQ ID NO: 258, respectively).

[0396] In one example, a nucleic acid sequence encodes an Cas13d protein having at least 60%, at least 70%, at least 75%, at least 80%, at least 90%, at least 92%, at least 95%, at least 96%, at least 97%, at least 99% or at least 99% sequence identity to SEQ ID NO: 1, 2, 3, 4, 5, 6, 7, 8, 9, 10, 11, 12, 13, 14, 15, 16, 17, 18, 19, 20, 21, 22, 23, 24, 25, 26, 27, 28, 29, 30, 31, 32, 33, 34, 35, 36, 37, 38, 39, 40, 41, 42, 43, 44, 45, 46, 47, 48, 49, 50, 51, 52, 53, 54, 55, 56, 57, 58, 59, 60, 61, 62, 63, 64, 65, 66, 67, 68, 69, 70, 71, 72, 73, 74, 75, 76, 77, 78, 79, 80, 81, 82, 83, 84, 85, 86, 87, 88, 89, 90, 91, 92, 93, 94, 95, 96, 97, 98, 99, 100, 101, 102, 103, 104, 105, 106, 107, 108, 109, 110, 111, 112, 113, 138, 147, 149, 153, 155, 158, 160, 162, 164, 166, 168, 170, 175, 177, 179, 181, 183, 185, 187, 189, 194, 198, 200, 202, 204, 206, 208, 210, 212, 214, 216, 218, 220, 222, 224, 226, 229, 231, 233, 235, 237, 239, 241, 243, 245, 247, 249, 251, or 253. Such nucleic acid sequences can be generated based on the amino acid sequences provided herein, and the genetic code. In one example, an Cas13d nucleic acid sequence has at least 70%, at least 80%, at least 85%, at least 90%, at least 92%, at least 95%, at least 98%, or at least 99% sequence identity to SEQ ID NO: 124, 125, 126, 127, 128, 139, 140 or 141. In one example, an Cas13d nucleic acid sequence is optimized for expression in mammalian cells, such as human cells, such as one having at least 70%, at least 80%, at least 85%, at least 90%, at least 92%, at least 95%, at least 98%, or at least 99% sequence identity to SEQ ID NO: 114, 115, 116, 117, 118, 119, 120, 121, 122, 123, 142, 143, 144, or 145.

[0397] One of skill can readily construct a variety of clones containing functionally equivalent nucleic acids, such as nucleic acids which differ in sequence but which encode the same Cas13d protein sequence. Silent mutations in the coding sequence result from the degeneracy (i.e., redundancy) of the genetic code, whereby more than one codon can encode the same amino acid residue. Thus, for example, leucine can be encoded by CTT, CTC, CTA, CTG, TTA, or TTG; serine can be encoded by TCT, TCC, TCA, TCG, AGT, or AGC; asparagine can be encoded by AAT or AAC; aspartic acid can be encoded by GAT or GAC; cysteine can be encoded by TGT or TGC; alanine can be encoded by GCT, GCC, GCA, or GCG; glutamine can be encoded by CAA or CAG; tyrosine can be encoded by TAT or TAC; and isoleucine can be encoded by ATT, ATC, or ATA. Tables showing the standard genetic code can be found in various sources (see, for example, Stryer, 1988, Biochemistry, 3^{rd} Edition, W.H. 5 Freeman and Co., NY).

[0398] Based on the genetic code, nucleic acid sequences coding for any Cas13d sequence can be generated. In some examples, such a sequence is optimized for expression in a host or target cell, such as a host cell used to express the Cas13d protein or a cell in which the disclosed methods are practice (such as in a mammalian cell, such as a human cell). Codon preferences and codon usage tables for a particular species can be used to engineer isolated nucleic acid molecules encoding an Cas13d (such as one encoding a protein having at least 80%, at least 85%, at least 90%, at least 92%, at least 95%, at least 96%, at least 97%, at least 98%, at least 99%, or 100% sequence identity to SEQ ID NO: 1, 2, 3, 4, 5, 6, 7, 8, 9, 10, 11, 12, 13, 14, 15, 16, 17, 18, 19, 20, 21, 22, 23, 24, 25, 26, 27, 28, 29, 30, 31, 32, 33, 34, 35, 36, 37, 38, 39, 40, 41, 42, 43, 44, 45, 46, 47, 48, 49, 50, 51, 52, 53, 54, 55, 56, 57, 58, 59, 60, 61, 62, 63, 64, 65, 66, 67, 68, 69, 70, 71, 72, 73, 74, 75, 76, 77, 78, 79, 80, 81, 82, 83, 84, 85, 86, 87, 88, 89, 90, 91, 92, 93, 94, 95, 96, 97, 98, 99, 100, 101, 102, 103, 104, 105, 106, 107, 108, 109, 110, 111, 112, 113, 138, 147, 149, 153, 155, 158, 160, 162, 164, 166, 168, 170, 175, 177, 179, 181, 183, 185, 187, 189, 194, 198, 200, 202, 204, 206, 208, 210, 212, 214, 216, 218, 220, 222, 224, 226, 229, 231, 233, 235, 237, 239, 241, 243, 245, 247, 249, 251, or 253 that takes advantage of the codon usage preferences of that particular species). For example, the Cas13d proteins disclosed herein can be designed to have codons that are preferentially used by a particular organism of interest. In one example, an Cas13d nucleic acid sequence is optimized for expression in human cells, such as one having at least 70%, at least 80%, at least 85%, at least 90%, at least 92%, at least 95%, at least 98%, or at least 99% sequence identity to SEQ ID NO: 114, 115, 116, 117, 118, 119, 120, 121, 122, 123, 142, 143, 144, or 145.

[0399] A nucleic acid encoding an Cas13d protein (such as one encoding a protein having at least 80%, at least 85%, at least 90%, at least 92%, at least 95%, at least 96%, at least 97%, at least 98%, at least 99%, or 100% sequence identity to SEQ ID NO: 1, 2, 3, 4, 5, 6, 7, 8, 9, 10, 11, 12, 13, 14, 15, 16, 17, 18, 19, 20, 21, 22, 23, 24, 25, 26, 27, 28, 29, 30, 31, 32, 33, 34, 35, 36, 37, 38, 39, 40, 41, 42, 43, 44, 45, 46, 47, 48, 49, 50, 51, 52, 53, 54, 55, 56, 57, 58, 59, 60, 61, 62, 63, 64, 65, 66, 67, 68, 69, 70, 71, 72, 73, 74, 75, 76, 77, 78, 79, 80, 81, 82, 83, 84, 85, 86, 87, 88, 89, 90, 91, 92, 93, 94, 95, 96, 97, 98, 99, 100, 101, 102, 103, 104, 105, 106, 107, 108, 109, 110, 111, 112, 113, 138, 147, 149, 153, 155, 158, 160, 162, 164, 166, 168, 170, 175, 177, 179, 181, 183, 185, 187, 189, 194, 198, 200, 202, 204, 206, 208, 210, 212, 214, 216, 218, 220, 222, 224, 226, 229, 231, 233, 235, 237, 239, 241, 243, 245, 247, 249, 251, or 253) can be cloned or amplified by in vitro methods, such as the polymerase chain reaction (PCR), the ligase chain reaction (LCR), the transcription-based amplification system (TAS), the self-sustained sequence replication system (3SR) and the Qβ replicase amplification system (QB). In addition, nucleic acids encoding an Cas13d protein (such as one encoding a protein having at least 80%, at least 85%, at least 90%, at least 92%, at least 95%, at least 96%, at least 97%, at least 98%, at least 99%, or 100% sequence identity to SEQ ID NO: 1, 2, 3, 4, 5, 6, 7, 8, 9, 10, 11, 12, 13, 14, 15, 16, 17, 18, 19, 20, 21, 22, 23, 24, 25, 26, 27, 28, 29, 30, 31, 32, 33, 34, 35, 36, 37, 38, 39, 40, 41, 42, 43, 44, 45, 46, 47, 48, 49, 50, 51, 52, 53, 54, 55, 56, 57, 58, 59, 60, 61, 62, 63, 64, 65, 66, 67, 68, 69, 70, 71, 72, 73, 74, 75, 76, 77, 78, 79, 80, 81, 82, 83, 84, 85, 86, 87, 88, 89, 90, 91, 92, 93, 94, 95, 96, 97, 98, 99, 100, 101, 102, 103, 104, 105, 106, 107, 108, 109, 110, 111, 112, 113, 138, 147, 149, 153, 155, 158, 160, 162, 164, 166, 168, 170, 175, 177, 179, 181, 183, 185, 187, 189, 194, 198, 200, 202, 204, 206, 208, 210, 212, 214, 216, 218, 220, 222, 224, 226, 229, 231, 233, 235, 237, 239, 241, 243, 245, 247, 249, 251, or 253) can be prepared by cloning techniques. Examples of appropriate cloning and sequencing techniques, and instructions sufficient to direct persons of skill through cloning are found in Sambrook et al. (ed.), Molecular Cloning: A Laboratory Manual 2nd ed., vol. 1-3, Cold Spring Harbor Laboratory Press, Cold Spring, Harbor, N.Y., 1989, and Ausubel et al., (1987) in “Current Protocols in Molecular Biology,” John Wiley and Sons, New York, N.Y.

[0400] Nucleic acid sequences encoding an Cas13d protein (such as one encoding a protein having at least 80%, at least 85%, at least 90%, at least 92%, at least 95%, at least 96%, at least 97%, at least 98%, at least 99%, or 100% sequence identity to SEQ ID NO: 1, 2, 3, 4, 5, 6, 7, 8, 9, 10, 11, 12, 13, 14, 15, 16, 17, 18, 19, 20, 21, 22, 23, 24, 25, 26, 27, 28, 29, 30, 31, 32, 33, 34, 35, 36, 37, 38, 39, 40, 41, 42, 43, 44, 45, 46, 47, 48, 49, 50, 51, 52, 53, 54, 55, 56, 57, 58, 59, 60, 61, 62, 63, 64, 65, 66, 67, 68, 69, 70, 71, 72, 73, 74, 75, 76, 77, 78, 79, 80, 81, 82, 83, 84, 85, 86, 87, 88, 89, 90, 91, 92, 93, 94, 95, 96, 97, 98, 99, 100, 101, 102, 103, 104, 105, 106, 107, 108, 109, 110, 111, 112, 113, 138, 147, 149, 153, 155, 158, 160, 162, 164, 166, 168, 170, 175, 177, 179, 181, 183, 185, 187, 189, 194, 198, 200, 202, 204, 206, 208, 210, 212, 214, 216, 218, 220, 222, 224, 226, 229, 231, 233, 235, 237, 239, 241, 243, 245, 247, 249, 251, or 253) can be prepared by any suitable method including, for example, cloning of appropriate sequences or by direct chemical synthesis by methods such as the phosphotriester method of Narang et al., Meth. Enzymol. 68:90-99, 1979; the phosphodiester method of Brown et al., Meth. Enzymol. 68:109-151, 1979; the diethylphosphoramidite method of Beaucage et al., Tetra. Lett. 22:1859-1862, 1981; the solid phase phosphoramidite triester method described by Beaucage & Caruthers, Tetra. Letts. 22(20):1859-1862, 1981, for example, using an automated synthesizer as described in, for example, Needham-VanDevanter et al., Nucl. Acids Res. 12:6159-6168, 1984; and, the solid support method of U.S. Pat. No. 4,458,066. Chemical synthesis produces a single stranded oligonucleotide. This can be converted into double stranded DNA by hybridization with a complementary sequence, or by polymerization with a DNA polymerase using the single strand as a template. One of skill would recognize that while chemical synthesis of DNA is generally limited to sequences of about 100 bases, longer sequences may be obtained by the ligation of shorter sequences.

[0401] In one example, an Cas13d protein (such as a protein having at least 80%, at least 85%, at least 90%, at least 92%, at least 95%, at least 96%, at least 97%, at least 98%, at least 99%, or 100% sequence identity to SEQ ID NO: 1, 2, 3, 4, 5, 6, 7, 8, 9, 10, 11, 12, 13, 14, 15, 16, 17, 18, 19, 20, 21, 22, 23, 24, 25, 26, 27, 28, 29, 30, 31, 32, 33, 34, 35, 36, 37, 38, 39, 40, 41, 42, 43, 44, 45, 46, 47, 48, 49, 50, 51, 52, 53, 54, 55, 56, 57, 58, 59, 60, 61, 62, 63, 64, 65, 66, 67, 68, 69, 70, 71, 72, 73, 74, 75, 76, 77, 78, 79, 80, 81, 82, 83, 84, 85, 86, 87, 88, 89, 90, 91, 92, 93, 94, 95, 96, 97, 98, 99, 100, 101, 102, 103, 104, 105, 106, 107, 108, 109, 110, 111, 112, 113, 138, 147, 149, 153, 155, 158, 160, 162, 164, 166, 168, 170, 175, 177, 179, 181, 183, 185, 187, 189, 194, 198, 200, 202, 204, 206, 208, 210, 212, 214, 216, 218, 220, 222, 224, 226, 229, 231, 233, 235, 237, 239, 241, 243, 245, 247, 249, 251, or 253) is prepared by inserting the cDNA which encodes the Cas13d protein into a plasmid or vector. The insertion can be made so that the Cas13d protein is read in frame so that the Cas13d protein is produced.

[0402] The Cas13d nucleic acid coding sequence (such as one having at least 80%, at least 85%, at least 90%, at least 92%, at least 95%, at least 96%, at least 97%, at least 98%, at least 99%, or 100% sequence identity to SEQ ID NO: 1, 2, 3, 4, 5, 6, 7, 8, 9, 10, 11, 12, 13, 14, 15, 16, 17, 18, 19, 20, 21, 22, 23, 24, 25, 26, 27, 28, 29, 30, 31, 32, 33, 34, 35, 36, 37, 38, 39, 40, 41, 42, 43, 44, 45, 46, 47, 48, 49, 50, 51, 52, 53, 54, 55, 56, 57, 58, 59, 60, 61, 62, 63, 64, 65, 66, 67, 68, 69, 70, 71, 72, 73, 74, 75, 76, 77, 78, 79, 80, 81, 82, 83, 84, 85, 86, 87, 88, 89, 90, 91, 92, 93, 94, 95, 96, 97, 98, 99, 100, 101, 102, 103, 104, 105, 106, 107, 108, 109, 110, 111, 112, 113, 138, 147, 149, 153, 155, 158, 160, 162, 164, 166, 168, 170, 175, 177, 179, 181, 183, 185, 187, 189, 194, 198, 200, 202, 204, 206, 208, 210, 212, 214, 216, 218, 220, 222, 224, 226, 229, 231, 233, 235, 237, 239, 241, 243, 245, 247, 249, 251, or 253) can be inserted into an expression vector including, but not limited to a plasmid, virus or other vehicle that can be manipulated to allow insertion or incorporation of sequences and can be expressed in either prokaryotes or eukaryotes. Hosts can include microbial, yeast, insect, plant and mammalian organisms. The vector can encode a selectable marker, such as a thymidine kinase gene or antibiotic resistance gene.

[0403] Nucleic acid sequences encoding an Cas13d protein (such as one encoding a protein having at least 80%, at least 85%, at least 90%, at least 92%, at least 95%, at least 96%, at least 97%, at least 98%, at least 99%, or 100% sequence identity to SEQ ID NO: 1, 2, 3, 4, 5, 6, 7, 8, 9, 10, 11, 12, 13, 14, 15, 16, 17, 18, 19, 20, 21, 22, 23, 24, 25, 26, 27, 28, 29, 30, 31, 32, 33, 34, 35, 36, 37, 38, 39, 40, 41, 42, 43, 44, 45, 46, 47, 48, 49, 50, 51, 52, 53, 54, 55, 56, 57, 58, 59, 60, 61, 62, 63, 64, 65, 66, 67, 68, 69, 70, 71, 72, 73, 74, 75, 76, 77, 78, 79, 80, 81, 82, 83, 84, 85, 86, 87, 88, 89, 90, 91, 92, 93, 94, 95, 96, 97, 98, 99, 100, 101, 102, 103, 104, 105, 106, 107, 108, 109, 110, 111, 112, 113, 138, 147, 149, 153, 155, 158, 160, 162, 164, 166, 168, 170, 175, 177, 179, 181, 183, 185, 187, 189, 194, 198, 200, 202, 204, 206, 208, 210, 212, 214, 216, 218, 220, 222, 224, 226, 229, 231, 233, 235, 237, 239, 241, 243, 245, 247, 249, 251, or 253) can be operatively linked to expression control sequences. An expression control sequence operatively linked to an Cas13d coding sequence is ligated such that expression of the Cas13d protein coding sequence is achieved under conditions compatible with the expression control sequences. The expression control sequences include, but are not limited to appropriate promoters, enhancers, transcription terminators, a start codon (i.e., ATG) in front of an Cas13d protein-encoding gene, splicing signal for introns, maintenance of the correct reading frame of that gene to permit proper translation of mRNA, and stop codons.

[0404] In one embodiment, vectors are used for expression in yeast such as S. cerevisiae, P. pastoris, or Kluyveromyces lactis. Exemplary promoters for use in yeast expression systems include but are not limited to: the constitutive promoters plasma membrane H⁺-ATPase (PMA1), glyceraldehyde-3-phosphate dehydrogenase (GPD), phosphoglycerate kinase-1 (PGK1), alcohol dehydrogenase-1 (ADH1), and pleiotropic drug-resistant pump (PDR5). In addition, many inducible promoters are of use, such as GALI-IO (induced by galactose), PH05 (induced by low extracellular inorganic phosphate), and tandem heat shock HSE elements (induced by temperature elevation to 37° C.). Promoters that direct variable expression in response to a titratable inducer include the methionine-responsive MET3 and MET25 promoters and copper-dependent CUP1 promoters. Any of these promoters may be cloned into multicopy (2μ) or single copy (CEN) plasmids to give an additional level of control in expression level. The plasmids can include nutritional markers (such as URA3, ADE3, HIS1, and others) for selection in yeast and antibiotic resistance (AMP) for propagation in bacteria. Plasmids for expression on K. lactis are known, such as pKLAC1.

[0405] Viral vectors can also be prepared that encode an Cas13d (such as one encoding a protein having at least 80%, at least 85%, at least 90%, at least 92%, at least 95%, at least 96%, at least 97%, at least 98%, at least 99%, or 100% sequence identity to SEQ ID NO: 1, 2, 3, 4, 5, 6, 7, 8, 9, 10, 11, 12, 13, 14, 15, 16, 17, 18, 19, 20, 21, 22, 23, 24, 25, 26, 27, 28, 29, 30, 31, 32, 33, 34, 35, 36, 37, 38, 39, 40, 41, 42, 43, 44, 45, 46, 47, 48, 49, 50, 51, 52, 53, 54, 55, 56, 57, 58, 59, 60, 61, 62, 63, 64, 65, 66, 67, 68, 69, 70, 71, 72, 73, 74, 75, 76, 77, 78, 79, 80, 81, 82, 83, 84, 85, 86, 87, 88, 89, 90, 91, 92, 93, 94, 95, 96, 97, 98, 99, 100, 101, 102, 103, 104, 105, 106, 107, 108, 109, 110, 111, 112, 113, 138, 147, 149, 153, 155, 158, 160, 162, 164, 166, 168, 170, 175, 177, 179, 181, 183, 185, 187, 189, 194, 198, 200, 202, 204, 206, 208, 210, 212, 214, 216, 218, 220, 222, 224, 226, 229, 231, 233, 235, 237, 239, 241, 243, 245, 247, 249, 251, or 253). Exemplary viral vectors include polyoma, SV40, adenovirus, vaccinia virus, adeno-associated virus, herpes viruses including HSV and EBV, lentivirus, Sindbis viruses, alphaviruses and retroviruses of avian, murine, and human origin. Baculovirus (Autographa californica multinuclear polyhedrosis virus; AcMNPV) vectors can be used and obtained from commercial sources. Other suitable vectors include retrovirus vectors, orthopox vectors, avipox vectors, fowlpox vectors, capripox vectors, suipox vectors, adenoviral vectors, herpes virus vectors, alpha virus vectors, baculovirus vectors, Sindbis virus vectors, vaccinia virus vectors and poliovirus vectors. Specific exemplary vectors are poxvirus vectors such as vaccinia virus, fowlpox virus and a highly attenuated vaccinia virus (MVA), adenovirus, baculovirus and the like. Pox viruses of use include orthopox, suipox, avipox, and capripox virus. Orthopox include vaccinia, ectromelia, and raccoon pox. One example of an orthopox of use is vaccinia. Avipox includes fowlpox, canary pox and pigeon pox. Capripox include goatpox and sheeppox. In one example, the suipox is swinepox. Other viral vectors that can be used include other DNA viruses such as herpes simplex virus and adenoviruses, and RNA viruses such as retroviruses and polio.

[0406] Viral vectors that encode an Cas13d protein (such as one encoding a protein having at least 80%, at least 85%, at least 90%, at least 92%, at least 95%, at least 96%, at least 97%, at least 98%, at least 99%, or 100% sequence identity to SEQ ID NO: 1, 2, 3, 4, 5, 6, 7, 8, 9, 10, 11, 12, 13, 14, 15, 16, 17, 18, 19, 20, 21, 22, 23, 24, 25, 26, 27, 28, 29, 30, 31, 32, 33, 34, 35, 36, 37, 38, 39, 40, 41, 42, 43, 44, 45, 46, 47, 48, 49, 50, 51, 52, 53, 54, 55, 56, 57, 58, 59, 60, 61, 62, 63, 64, 65, 66, 67, 68, 69, 70, 71, 72, 73, 74, 75, 76, 77, 78, 79, 80, 81, 82, 83, 84, 85, 86, 87, 88, 89, 90, 91, 92, 93, 94, 95, 96, 97, 98, 99, 100, 101, 102, 103, 104, 105, 106, 107, 108, 109, 110, 111, 112, 113, 138, 147, 149, 153, 155, 158, 160, 162, 164, 166, 168, 170, 175, 177, 179, 181, 183, 185, 187, 189, 194, 198, 200, 202, 204, 206, 208, 210, 212, 214, 216, 218, 220, 222, 224, 226, 229, 231, 233, 235, 237, 239, 241, 243, 245, 247, 249, 251, or 253) can include at least one expression control element operationally linked to the nucleic acid sequence encoding the Cas13d protein. The expression control elements control and regulate the expression of the Cas13d nucleic acid sequence. Exemplary expression control elements that can be used include, but are not limited to, lac system, operator and promoter regions of phage lambda, yeast promoters and promoters derived from polyoma, adenovirus, retrovirus or SV40. In one example the promoter is CMV, U6, CBh, CMW, Cbh, EF1a. In one example, the promoter is a cell type specific promoter, such as synapsin or GFAP, or an inducible promoter, such as a tetracycline inducible promoter. Additional operational elements include, but are not limited to, leader sequence, termination codons, polyadenylation signals and any other sequences necessary for the appropriate transcription and subsequent translation of the nucleic acid sequence encoding the Cas13d protein in the host system. The expression vector can contain additional elements necessary for the transfer and subsequent replication of the expression vector containing the nucleic acid sequence in the host system. Examples of such elements include, but are not limited to, origins of replication and selectable markers.

[0407] In one example, the vector includes a polyA signal after the Cas13d protein coding sequence, a WPRE signal for expression in viral vectors, or combinations thereof.

[0408] In one example, the method uses direct delivery of an mRNA that encodes for an Cas13d protein.

[0409] C. Guide Nucleic Acid Molecules

[0410] The disclosure provides guide nucleic acid molecules, such as guide RNA (gRNA or crRNA, CRISPR (guide) RNA), which can be used in the methods, compositions, and kits provided herein. Such molecules can include naturally occurring or non-naturally occurring nucleotides or ribonucleotides (such as LNAs or other chemically modified nucleotides or ribonucleotides, for example to protect a guide RNA from degradation). In some examples, the guide sequence is RNA. The guide nucleic acid can include modified bases or chemical modifications (e.g., see Latorre et al., Angewandte Chemie 55:3548-50, 2016). A guide sequence directs an Cas13d protein to a target RNA, thereby targeting the RNA (e.g., modifying or detecting the RNA).

[0411] Guide molecules include one or more regions referred to as spacers. A spacer has sufficient complementarity with a target RNA sequence to hybridize with the target RNA and direct sequence-specific binding of an Cas13d protein to the target RNA. Thus, the spacer is the variable portion of the guide sequence. In some examples, a spacer has 100% complementarity to a target RNA (or region of the RNA to be target), but a spacer can have less than 100% complementarity to a target RNA, such as at least 80%, at least 85%, at least 90%, at least 95%, at least 98% or at least 99% complementarity to a target RNA.

[0412] A guide sequence can also include one or more direct repeats (DRs). The DR is the constant portion of the guide, which contains strong secondary structure (FIG. S2C), which facilitate interaction between an Cas13d protein and the guide molecule. Each ortholog has a slightly different DR sequence (e.g., SEQ ID NOS: 129, 130, 131, 132, 133, 134, 135, 136, 137, 148, 150, 151, 152, 154, 156, 157, 159, 161, 163, 165, 167, and 169). In one example, the gRNA includes at least one DR sequence having at least 80%, at least 85%, at least 90%, at least 92%, at least 95%, at least 96%, at least 97%, at least 98%, at least 99%, or 100% sequence identity to SEQ ID NO: 129, 130, 131, 132, 133, 134, 135, 136, 137, 148, 150, 151, 152, 154, 156, 157, 159, 161, 163, 165, 167, 169, 176, 178, 180, 182, 184, 186, 188, 190, 191, 192, 193, 199, 201, 203, 205, 207, 209, 211, 213, 215, 217, 219, 221, 223, 225, 227, 228, 230, 232, 234, 236, 238, 240, 242, 244, 246, 248, 250, 252, or 254 (such as 1, 2, 3, or 4 of such DR sequences).

[0413] In one example, a guide sequence includes a constant DR on its 5′-end and a variable spacer on its 3′ end. In one example includes the sequence DR-spacer-DR-spacer. In some examples, the sequence DR-spacer is repeated two or more times, such as at least 3 times or at least 4 times. This type of sequence is called a guide array.

[0414] Guide molecules generally exist in various states of processing. In one example, an unprocessed guide RNA is 36 nt of DR followed by 30-32 nt of spacer. The guide RNA is processed (truncated/modified) by Cas13d itself or other RNases into the shorter “mature” form. In some embodiments, an unprocessed guide sequence is about, or at least about 30, 35, 40, 45, 50, 55, 60, 61, 62, 63, 64, 65, 66, 67, 68, 69, 70, 71, 72, 73, 74, 75, or more nucleotides (nt) in length. In some embodiments, a processed guide sequence is about 44 to 60 nt (such as 40, 41, 42, 43, 44, 45, 46, 47, 48, 49, 50, 51, 52, 53, 54, 55, 56, 57, 58, 59, 60, 61, 62, 63, 64, 65, 66, 67, 68, 69, or 70 nt). In some embodiments, an unprocessed spacer is about 28-32 nt long (such as 25, 26, 27, 28, 29, 30, 31, 32, 33, 34, or 35 nt) while the mature (processed) spacer can be about 10 to 30 nt, 10 to 25 nt, 14 to 25 nt, 20 to 22 nt, or 14-30 nt (such as 10, 11, 12, 13, 14, 15, 16, 17, 18, 19, 20, 21, 22, 23, 24, 25, 26, 27, 28, 29, 30, 31, 32, 33, 34, or 35 nt). In some embodiments, an unprocessed DR is about 36 nt (such as 30, 31, 32, 33, 34, 35, 36, 37, 38, 39, 40 or 41 nt), while the processed DR is about 30 nt (such as 25, 26, 27, 28, 29, 30, 31, 32, 33, 34, or 35 nt).

[0415] The ability of a guide sequence to direct sequence-specific binding of a CRISPR complex to a target RNA may be assessed by any suitable assay. For example, the components of a CRISPR system sufficient to form a CRISPR complex, including the guide sequence to be tested, may be provided to a host cell having the corresponding target RNA molecule, such as by transfection with vectors encoding the components of the CRISPR sequence, followed by an assessment of preferential cleavage within the target sequence. Similarly, cleavage of a target RNA sequence may be evaluated in a test tube by providing the target RNA, components of a CRISPR complex, including the guide sequence to be tested and a control guide sequence different from the test guide sequence, and comparing binding or rate of cleavage at the target RNA between the test and control guide sequence reactions. Other assays are possible, and will occur to those skilled in the art.

[0416] Also provided are vectors, such as a viral vector or plasmid (e.g., retrovirus, lentivirus, adenovirus, adeno-associated virus, or herpes simplex virus), that includes a guide nucleic acid molecule. Exemplary vectors are described herein. In some examples, the guide nucleic acid molecule is operably linked to a promoter or expression control element (examples of which are provided elsewhere in this application). As described elsewhere herein, such vectors can include other elements, such as a gene encoding a selectable marker, such as an antibiotic, such as puromycin, hygromycin, or a detectable marker such as GFP or other fluorophore.

[0417] In one example, a plurality of gRNAs are part of an array (which can be part of a vector, such as a viral vector or plasmid). For example, a guide array including the sequence DR-spacer-DR-spacer-DR-spacer, can include three unique unprocessed gRNAs (one for each DR-spacer sequence). Once introduced into a cell or cell-free system, the array is processed by the Cas13d protein into the three individual mature gRNAs. This allows for multiplexing, e.g. the delivery of multiple gRNAs to a cell or system to target multiple target RNAs or multiple positions within a single target RNA (or combinations thereof).

[0418] D. Vectors that Encode Cas13d and Guide Nucleic Acid Molecules

[0419] The disclosure provides vectors, such as plasmids and viral vectors as described elsewhere herein, which include one or more guide molecule coding sequences (e.g., to permit targeting of one or more RNA molecules), and one or more Cas13d protein coding sequences. Such vectors can be used in the methods, compositions, and kits provided herein. Such vectors can include naturally occurring or non-naturally occurring nucleotides or ribonucleotides. Such vectors can include a single promoter operably linked to the guide molecule (which can be part of an array that includes at least two different guide molecules) and the Cas13d protein coding sequence. Alternatively, the guide molecule (which can be part of an array that includes at least two different guide molecules) and the Cas13d protein coding sequence can be operably linked to different promoters.

[0420] E. Recombinant Cells and Cell-Free Systems

[0421] Cells that include a non-native Cas13d protein, a non-native Cas13d protein coding sequence, a guide molecule (or coding sequence), or combinations thereof, are provided. Such recombinant cells can be used in the methods, compositions, and kits provided herein. Nucleic acid molecules encoding an Cas13d protein disclosed herein and/or nucleic acid molecules encoding a guide molecule can be introduced into cells to generate transformed (e.g., recombinant) cells. In some examples, such cells are generated by introducing one or more non-native Cas13d proteins and one or more guide molecules (e.g., gRNAs) into the cell, for example as a ribonucleoprotein (RNP) complex.

[0422] Similarly, cell free systems, such as those generated from lysed cells (or those that include an Cas13d RNP in a test tube or other vessel, into which in vitro transcribed or chemically synthesized target RNAs are added), which include a, Cas13d protein, a Cas13d protein coding sequence, a guide molecule (or coding sequence), or combinations thereof, are provided. Such cell free systems can be used in the methods, compositions, and kits provided herein. In some examples, one or more non-native Cas13d proteins and one or more guide molecules (e.g., gRNAs) are added to a cell free system, for example as a RNP complex.

[0423] Thus, cells and cell-free systems containing an Cas13d protein (such as a protein having at least 80%, at least 85%, at least 90%, at least 92%, at least 95%, at least 96%, at least 97%, at least 98%, at least 99%, or 100% sequence identity to SEQ ID NO: 1, 2, 3, 4, 5, 6, 7, 8, 9, 10, 11, 12, 13, 14, 15, 16, 17, 18, 19, 20, 21, 22, 23, 24, 25, 26, 27, 28, 29, 30, 31, 32, 33, 34, 35, 36, 37, 38, 39, 40, 41, 42, 43, 44, 45, 46, 47, 48, 49, 50, 51, 52, 53, 54, 55, 56, 57, 58, 59, 60, 61, 62, 63, 64, 65, 66, 67, 68, 69, 70, 71, 72, 73, 74, 75, 76, 77, 78, 79, 80, 81, 82, 83, 84, 85, 86, 87, 88, 89, 90, 91, 92, 93, 94, 95, 96, 97, 98, 99, 100, 101, 102, 103, 104, 105, 106, 107, 108, 109, 110, 111, 112, 113, 138, 147, 149, 153, 155, 158, 160, 162, 164, 166, 168, 170, 175, 177, 179, 181, 183, 185, 187, 189, 194, 198, 200, 202, 204, 206, 208, 210, 212, 214, 216, 218, 220, 222, 224, 226, 229, 231, 233, 235, 237, 239, 241, 243, 245, 247, 249, 251, or 253) are disclosed. Similarly, cells and cell-free systems containing a guide molecule, such as one having at least one DR sequence having at least 80%, at least 85%, at least 90%, at least 92%, at least 95%, at least 96%, at least 97%, at least 98%, at least 99%, or 100% sequence identity to SEQ ID NO: 129, 130, 131, 132, 133, 134, 135, 136, or 137, and in some examples also at least one spacer sequence complementary to a target RNA, are provided.

[0424] Such recombinant cells (e.g., which can be used to generate a cell-free system) can be eukaryotic or prokaryotic. Examples of such cells include, but are not limited to bacteria, archaea, plant, fungal, yeast, insect, and mammalian cells, such as Lactobacillus, Lactococcus, Bacillus (such as B. subtilis), Escherichia (such as E. coli), Clostridium, Saccharomyces or Pichia (such as S. cerevisiae or P. pastoris), Kluyveromyces lactis, Salmonella typhimurium, Drosophila cells, C. elegans cells, Xenopus cells, SF9 cells, C129 cells, 293 cells, Neurospora, and immortalized mammalian cell lines (e.g., Hela cells, myeloid cell lines, and lymphoid cell lines).

[0425] In one example, the cell is a prokaryotic cell, such as a bacterial cell, such as E. coli.

[0426] In one example, the cell is a eukaryotic cell, such as a mammalian cell, such as a human cell. In one example, the cell is primary eukaryotic cell, a stem cell, a tumor/cancer cell, a circulating tumor cell (CTC), a blood cell (e.g., T cell, B cell, NK cell, Tregs, etc.), hematopoietic stem cell, specialized immune cell (e.g., tumor-infiltrating lymphocyte or tumor-suppressed lymphocytes), a stromal cell in the tumor microenvironment (e.g., cancer-associated fibroblasts, etc.) In one example, the cell is a brain cell (e.g., neurons, astrocytes, microglia, retinal ganglion cells, rods/cones, etc.) of the central or peripheral nervous system).

[0427] In one example, a cell is part of (or obtained from) a biological sample, such as a biological specimen containing genomic DNA, RNA (e.g., mRNA), protein, or combinations thereof, obtained from a subject. Examples include, but are not limited to, peripheral blood, serum, plasma, urine, saliva, sputum, tissue biopsy, fine needle aspirate, surgical specimen, and autopsy material. Such cells can also be used to generate a cell free system.

[0428] In one example the cell (or cell free system) is from a tumor, such as a hematological tumor (e.g., leukemias, including acute leukemias (such as acute lymphocytic leukemia, acute myelocytic leukemia, acute myelogenous leukemia and myeloblastic, promyelocytic, myelomonocytic, monocytic and erythroleukemia), chronic leukemias (such as chronic myelocytic (granulocytic) leukemia, chronic myelogenous leukemia, and chronic lymphocytic leukemia), polycythemia vera, lymphoma, Hodgkin's disease, non-Hodgkin's lymphoma (including low-, intermediate-, and high-grade), multiple myeloma, Waldenström's macroglobulinemia, heavy chain disease, myelodysplastic syndrome, mantle cell lymphoma and myelodysplasia) or solid tumor (e.g., sarcomas and carcinomas: fibrosarcoma, myxosarcoma, liposarcoma, chondrosarcoma, osteogenic sarcoma, and other sarcomas, synovioma, mesothelioma, Ewing's tumor, leiomyosarcoma, rhabdomyosarcoma, colon carcinoma, lymphoid malignancy, pancreatic cancer, breast cancer, lung cancers, ovarian cancer, prostate cancer, hepatocellular carcinoma, squamous cell carcinoma, basal cell carcinoma, adenocarcinoma, sweat gland carcinoma, sebaceous gland carcinoma, papillary carcinoma, papillary adenocarcinomas, medullary carcinoma, bronchogenic carcinoma, renal cell carcinoma, hepatoma, bile duct carcinoma, choriocarcinoma, Wilms' tumor, cervical cancer, testicular tumor, bladder carcinoma, and CNS tumors (such as a glioma, astrocytoma, medulloblastoma, craniopharyogioma, ependymoma, pinealoma, hemangioblastoma, acoustic neuroma, oligodendroglioma, menangioma, melanoma, neuroblastoma and retinoblastoma).

[0429] In one example the cell (or cell free system) is obtained from an environmental sample, such as a water, soil, or air sample.

[0430] F. Compositions & Kits

[0431] Compositions and kits that include a Cas13d protein, a Cas13d protein coding sequence, a guide molecule (or coding sequence), or combinations thereof, are provided. In one example, the composition or kit includes an RNP complex composed of one or more Cas13d proteins and one or more guide molecules (e.g., gRNAs). In one example, the composition or kit includes a vector encoding an Cas13d protein, a guide molecule, or both. In one example, the composition or kit includes a cell, such as a bacterial cell or eukaryotic cell, that includes a non-native Cas13d protein, a non-native Cas13d protein coding sequence, a guide molecule (or coding sequence), or combinations thereof. In one example, the composition or kit includes a cell-free system that includes a non-native Cas13d protein, a non-native Cas13d protein coding sequence, a guide molecule (or coding sequence), or combinations thereof.

[0432] Such compositions can include a pharmaceutically acceptable carrier (e.g., saline, water, PBS). In some examples, the composition is a liquid, lyophilized powder, or cryopreserved.

[0433] In some examples, the kit includes a delivery system (e.g., liposome, a particle, an exosome, a microvesicle, a viral vector, or a plasmid), and/or a label (e.g., a peptide or antibody that can be conjugated either directly to an Cas13d RNP or to a particle containing the Cas1 RNP to direct cell type specific uptake/enhance endosomal escape/enable blood-brain barrier crossing etc.). In some examples, the kits further include cell culture or growth media, such as media appropriate for growing bacterial, plant, insect, or mammalian cells.

[0434] In some examples, such parts of a kit are in separate containers.

[0435] G. Targeting RNA

[0436] The disclosed Cas13d proteins (and coding sequences), and guide molecules (e.g., gRNA and coding sequences) can be used in a CRISPR/Cas system to target one or more RNA molecules, such as those present in a sample (such as a biological sample, environmental sample (e.g., soil, air or water sample), and the like. In one example, the target RNA is a coding RNA. In one example, the target RNA is a nuclear RNA. In other examples, the target RNA is non-coding RNA (such as functional RNA, siRNA, microRNA, snRNA, snoRNA, piRNA, scaRNA, tRNA, rRNA, IncRNA, or lincRNA). Such RNA targeting methods can be performed in vitro (such as in cell culture or in a cell-free system), or in vivo (such as in an organism, embryo, or mammal).

[0437] The CRISPR/Cas system provided herein includes two general components: (1) an Cas13d protein or its coding sequence (whose expression can be driven by a promoter) and (2) a guide nucleic acid molecule, such as RNA (gRNA), which is specific for the target RNA (whose expression can also be driven by promoter. When introduced into cells (or to a cell free system) for example (1) as Cas13d mRNA and Cas13d gRNA, (2) as part of a single vector or plasmid or divided into multiple vectors or plasmids, (3) as separate Cas13d protein and guide molecules, or (4) as an RNP complex of the Cas13d protein and guide molecule, the guide molecule guides the Cas13d to the target RNA. If the Cas13d protein has a native HEPN domain(s) or is fused to an appropriate effector domain bearing RNase activity, the RNA can be cut. If the Cas13d protein has a mutated HEPN domain(s), a guide array can be processed into mature gRNAs, but the target RNA is not cut. Using this system, RNA sequences are easily targeted, for example edited or detected, optionally with an effector domain.

[0438] 1. Introduction of Cas13d Protein Directly into a Cell

[0439] In one example, the Cas13d protein is expressed in a recombinant cell, such as E. coli, and purified. The resulting purified Cas13d protein, along with an appropriate guide molecule specific for the target RNA, is then introduced into a cell or organism where one or more RNAs can be targeted. In some examples, the Cas13d protein and guide nucleic acid molecule are introduced as separate components into the target cell/organism. In other examples, the purified Cas13d protein is complexed with the guide nucleic acid (e.g., gRNA), and this ribonucleoprotein (RNP) complex is introduced into target cells (e.g., using transfection or injection). In some examples, the Cas13d protein and guide molecule are injected into an embryo (such as a human, mouse, zebrafish, or Xenopus embryo).

[0440] Once the Cas13d protein and guide nucleic acid molecule are in the cell, one or more RNAs can be targeted.

[0441] 2. Expression of Cas13d from Nucleic Acids

[0442] In one example, the Cas13d protein is expressed from a nucleic acid molecule in a cell containing a target RNA, for example an RNA to be detected or modified. In some such examples, the Cas13d protein is expressed from a vector, such as a viral vector or plasmid introduced into a cell or into a cell-free system. This results in the production of the Cas13d protein in the cell, organism, or system. In addition, these nucleic acid molecules can be co-expressed in the cell/organism/system with the guide nucleic acid molecule (e.g., gRNA) specific for the target RNA.

[0443] In one example, multiple plasmids or vectors are used for RNA targeting. The nucleic acid molecule encoding the Cas13d can be provided for example on one vector or plasmid, and the guide nucleic acid molecule (e.g., gRNA) on another plasmid or vector. Multiple plasmids or viral vectors can be mixed and introduced into cells (or a cell free system) at the same time, or separately.

[0444] In some examples, multiple nucleic acid molecules are expressed from a single vector or plasmid. For example, a single vector can include the nucleic acid molecule encoding the Cas13d, and a separate vector can include the guide molecule.

[0445] In some examples a plurality of different guide molecules (e.g., gRNAs), one for each target (such as 1, 2, 3, 4, 5, or 10 different targets), are present on a single array and/or vector. In one example, the method includes delivering a plurality of gRNAs (such as at least 2, at least 3, at least 4, at least 5, at least 10, at least 20, or at least 50 different gRNAs), which are part of an array (which can be part of a vector, such as a viral vector or plasmid). Once introduced into a cell or cell-free system, the array is processed by the Cas13d protein into the individual mature gRNAs.

[0446] The nucleic acid molecules expressed from the vector can be under the control of a promoter and optionally contain selection markers (such as antibiotic resistance).

[0447] In some examples, the protein and guide molecules are expressed by an embryo (such as a zebrafish or Xenopus embryo). The Cas13d protein can be expressed from injected plasmid DNA, injected mRNA, or stably integrated copies into the animal genome. The gRNA can be directly injected or expressed from a vector or stably integrated copies into the animal genome.

[0448] 3. Targets

[0449] One or more RNAs can be targeted by the disclosed methods, such as at least 1, at least 2, at least 3, at least 4 or at least 5 different RNAs in a cell, cell-free system, or organism, such as 1, 2, 3, 4, 5, 6, 7, 8, 9 or 10 different RNAs. In one example, the RNA is associated with a disease such as cystic fibrosis, Huntington's disease, Tay-Sachs, Fragile X syndrome, Fragile X-associated tremor/ataxia syndrome, Duchenne muscular dystrophy, myotonic dystrophy, spinal muscular atrophy, spinocerebellar ataxia, or familial ALS. In one example, the RNA is associated with cancer (e.g., a cancer of the lung, breast, colon, liver, pancreas, prostate, bone, brain, skin (e.g., melanoma), or kidney). Examples of target RNAs include, but are not limited to those associated with cancer (e.g., BCR-ABL, Ras, Raf, p53, BRCA1, BRCA2, CXCR4, beta-catenin, HER2, and CDK4).

[0450] In one example, the RNA is associated with viral infection, such as infection by a positive-strand RNA viruses, such as Picornaviruses (such as Aphthoviridae [for example foot-and-mouth-disease virus (FMDV)]), Cardioviridae; Enteroviridae (such as Coxsackie viruses, Echoviruses, Enteroviruses, and Polioviruses); Rhinoviridae (Rhinoviruses)); Hepataviridae (Hepatitis A viruses); Togaviruses (examples of which include rubella; alphaviruses (such as Western equine encephalitis virus, Eastern equine encephalitis virus, and Venezuelan equine encephalitis virus)); Flaviviruses (examples of which include Dengue virus, West Nile virus, and Japanese encephalitis virus); Calciviridae (which includes Norovirus and Sapovirus); or Coronaviruses (examples of which include SARS coronaviruses, such as the Urbani strain), or a negative-strand RNA virus, such as Orthomyxyoviruses (such as the influenza virus), Rhabdoviruses (such as Rabies virus), and Paramyxoviruses (examples of which include measles virus, respiratory syncytial virus, or parainfluenza viruses), or a DNA viral infection (such as infection by Herpesviruses (such as Varicella-zoster virus, for example the Oka strain; cytomegalovirus; and Herpes simplex virus (HSV) types 1 and 2), Adenoviruses (such as Adenovirus type 1 and Adenovirus type 41), Poxviruses (such as Vaccinia virus), or Parvoviruses (such as Parvovirus B19).

[0451] In one example, the RNA is associated with a bacterial infection or property of a bacterial infection, such as bacterial resistance, persistence, or antibiotic resistance. Detection of these RNAs can be used for diagnostic methods, while editing these RNAs in cell-based or cell-free systems can be used for therapeutic methods.

[0452] 4. Methods of Detecting RNA

[0453] In one example, the method of targeting an RNA results in detecting, visualizing, or labeling a target RNA. For example, by using at least one Cas13d protein with a mutated HEPN domain (e.g., SEQ ID NO: 2 or 4), at least one gRNA containing at least one spacer sequence specific for the target RNA, and an effector module, the target RNA will be recognized by Cas13d but will not be cut or nicked while the effector module becomes activated. In some examples, such a method is used to detect a target RNA. Such a method can be used in a cell or cell free system to determine if a target RNA is present, such as in a tumor cell. In some examples, the cell or cell free system is obtained from a tissue sample, blood sample or saliva sample.

[0454] In one example, the method of detecting RNA comprises of an Cas13d protein fused to a fluorescent protein or other detectable label along with a gRNA containing a spacer sequence specific for the target RNA. Binding of Cas13d to the target RNA can be visualized by microscopy or other methods of imaging. In another example, RNA aptamer sequences can be appended to or inserted within the gRNA molecule, such as MS2, PP7, Qβ, and other aptamers. The introduction of proteins that specifically bind to these aptamers, e.g. the MS2 phage coat protein, fused to a fluorescent protein or other detectable label can be used to detect the target RNA because the Cas13d-gRNA-target RNA complex will be labeled via the aptamer interaction.

[0455] In another example, the method of detecting RNA is a transcriptional sensor (e.g., as part of a synthetic circuit) for diagnostics or therapeutics. For example, the transcriptional sensor can be comprised of at least one Cas13d protein with a mutated HEPN domain (e.g., SEQ ID NO: 2 or 4), at least one gRNA containing at least one spacer sequence specific for the target RNA, and an effector module such as an optionally split fluorescent protein or probe; an optionally split luminescent protein or probe; an optionally split enzyme that catalyzes a detectable reaction such as ubiquitin or TEV protease; a FRET-compatible protein pair; one or more transcription factor(s) fused to Cas13d via cleavable linkers; a split intein that trans-splices a protein to restore its function such as a transcription factor; a kinase-substrate pair that activates upon phosphorylation; one, two, or more monomers that activate upon dimerization or multimerization; or one or more proteins that induce conformational and functional change upon interaction. In one example, the spatial proximity of two or more Cas13d proteins and gRNAs due to binding a particular transcript would activate the effector module, resulting in a detectable signal or detectable activity in the cell.

[0456] For example, the transcriptional sensor could allow a cancer-specific transcript, inflammation-specific transcript, disease-specific transcript, or cell state-specific transcript to be detected. A synthetic circuit containing a Cas13d-based system that is able to sense particular transcripts could encode conditional logic, e.g. requiring target detection to up- or down-regulate a gene for therapeutic application.

[0457] In one example, the method results in a detectable agent being bound to the target RNA, which can be detected. For example, two separate Cas13d fusion proteins that each include part of a fluorophore (e.g., GFP), and two different gRNAs with different spacer sequences that target regions of an RNA in close proximity, can be used. When the two parts bind to the target RNA in proximity, the two parts of the fluorophore form a complete fluorophore, thereby generating a detectable signal.

[0458] In one example, the method results in RNA detection, for example by triggering a response such as expression of a second gene, modification of a protein, translocation of a protein or RNA to a different location, induction of cell death via suicide gene, induction of cell proliferation, induction of a transgene that enables a secondary function, induction of a permanent change in DNA sequence to enable storing a memory of past transcriptional events, or altering the RNA to enable pulldown.

[0459] In one embodiment, two halves of a transcription factor could be linked to two separate Cas13d via a split intein system. The Cas13d proteins are provided with two different gRNAs with different spacer sequences that target regions of an RNA in close proximity. Upon binding to the target RNA in proximity, the split inteins trans-splice a reconstituted transcription factor (TF) so that it can translocate to the nucleus and turn on a target gene or cluster of target genes. In one example, the target gene could be an endogenous gene in the cell. In another example, the target gene could be a transgene expressed on a vector or introduced through genetic engineering, such as a fluorescent protein or toxin.

[0460] 5. Methods of Detecting RNA in Cell-Free Systems

[0461] In one example, the method of detecting a target RNA in a cell-free system results in a detectable label or enzyme activity. For example, by using at least one Cas13d protein (e.g., SEQ ID NO: 3, 42, 62, 70, 82, 83, and 92), at least one gRNA containing at least one spacer sequence specific for the target RNA, and a detectable label, the target RNA will be recognized by Cas13d. The binding of the target RNA by Cas13d triggers its RNase activity, which can lead to the cleavage of the target RNA as well as the detectable label.

[0462] In one example, the detectable label is an RNA linked to a fluorescent probe and quencher. The intact detectable RNA links the fluorescent probe and quencher, suppressing fluorescence. Upon cleavage by Cas13d of the detectable RNA, the fluorescent probe is released from the quencher and displays fluorescent activity. Such a method can be used to determine if a target RNA is present in a lysed cell sample, lysed tissue sample, blood sample, saliva sample, environmental sample (such as a water, soil, or air sample), or other lysed cell or cell-free sample. Such a method can also be used to detect a pathogen, such as a virus or bacteria, or diagnose a disease state, such as a cancer.

[0463] In one example, the detection of the target RNA aids in the diagnosis of disease and/or pathological state, or the existence of a viral or bacterial infection. For example, Cas13d-mediated detection of non-coding RNAs such as PCA3 can be used to diagnose prostate cancer if detected in patient urine. In another example, Cas13d-mediated detection of the IncRNA-AA174084, which is a biomarker of gastric cancer, can be used to diagnose gastric cancer.

[0464] 6. Methods of Editing Target RNA

[0465] In one example, the method of targeting an RNA results in editing the sequence of a target RNA. For example, by using an Cas13d protein with a non-mutated HEPN domain (e.g., SEQ ID NOS: 1, 3, 42, 62, 70, 82, 83, and 92), and a gRNA containing at least one a spacer sequence specific for the target RNA, the target RNA can be cut or nicked at a precise location. In some examples, such a method is used to decrease expression of a target RNA, which will decrease translation of the corresponding protein. Such a method can be used in a cell where increased expression of an RNA is not desired. In one example, the RNA is associated with a disease such as cystic fibrosis, Huntington's disease, Tay-Sachs, Fragile X syndrome, Fragile X-associated tremor/ataxia syndrome, muscular dystrophy, myotonic dystrophy, spinal muscular atrophy, spinocerebellar ataxia, or familial ALS. In another example, the RNA is associated with cancer (e.g., a cancer of the lung, breast, colon, liver, pancreas, prostate, bone, brain, skin (e.g., melanoma), or kidney). Examples of target RNAs include, but are not limited to those associated with cancer (e.g., PD-L1, BCR-ABL, Ras, Raf, p53, BRCA1, BRCA2, CXCR4, beta-catenin, HER2, and CDK4). Editing such target RNAs can have a therapeutic effect.

[0466] In another example, the RNA is expressed in an immune cell. The target RNA could, for example, code for a protein leading to the repression of a desirable immune response, such as infiltration of a tumor. Knock-down of such an RNA could enable progression of such a desirable immune response (e.g., PD1, CTLA4, LAG3, TIM3). In another example, the target RNA encodes a protein resulting in the undesirable activation of an immune response, for example in the context of an autoimmune disease such as multiple sclerosis, Crohn's disease, lupus, or rheumatoid arthritis.

[0467] In one example, targeting the target RNA allows for decreasing expression of the target protein encoded by the RNA. For example, by using an Cas13d fusion protein with a mutated HEPN domain (e.g., SEQ ID NO: 2 or 4) and a translational repression domain (such as Pumilio or FBF PUF proteins, deadenylases, CAF1, Argonaute proteins, and others), and a guide RNA containing at least one spacer sequence specific for the target RNA, expression of a target RNA can be decreased.

[0468] In some examples, Cas13d can be fused to a ribonuclease (such as a PIN endonuclease domain, an NYN domain, an SMR domain from SOT1, or an RNase domain from Staphylococcal nuclease) or a domain that affects RNA stability (such as tristetraprolin or domains from UPF1, EXOSC5, and STAU1).

[0469] In another example, RNA aptamer sequences can be appended to or inserted within the gRNA molecule, such as MS2, PP7, Qβ, and other aptamers. Proteins that specifically bind to these aptamers, e.g. the MS2 phage coat protein, can be fused to a translational repression domain, a ribonuclease, or a domain that affects RNA stability. This aptamer-effector domain fusion can be used to target the target RNA because the Cas13d and gRNA complex will guide the aptamer protein-effector domain in proximity to the target RNA.

[0470] Such a method can be used in a cell where increased expression of an RNA is not desired, such as when an expressed RNA is associated with a disease such as cystic fibrosis, Huntington's disease, Tay-Sachs, Fragile X syndrome, Fragile X-associated tremor/ataxia syndrome, muscular dystrophy, myotonic dystrophy, spinal muscular atrophy, spinocerebellar ataxia, or familial ALS. In another example, the target RNA is associated with cancer (e.g., a cancer of the lung, breast, colon, liver, pancreas, prostate, bone, brain, skin (e.g., melanoma), or kidney). Examples of target RNAs include, but are not limited to those associated with cancer (e.g., PD-L1, BCR-ABL, Ras, Raf, p53, BRCA1, BRCA2, CXCR4, beta-catenin, HER2, and CDK4). Editing such target RNAs would have a therapeutic effect.

[0471] In another example, the RNA is expressed in an immune cell. The target RNA could, for example, code for a protein leading to the repression of a desirable immune response, such as infiltration of a tumor. Knock-down of such an RNA could enable progression of such a desirable immune response (e.g., PD1, CTLA4, LAG3, TIM3). In another example, the target RNA could encode a protein resulting in the undesirable activation of an immune response, for example in the context of an autoimmune disease such as multiple sclerosis, Crohn's disease, lupus, or rheumatoid arthritis.

[0472] In one example, targeting the target RNA allows for activating or increasing expression of the target RNA. For example, by using an Cas13d fusion protein with a mutated HEPN domain (e.g., SEQ ID NO: 2 or 4) and a translational activation domain (such as eIF4E and other translation initiation factors, a domain of the yeast poly(A)-binding protein or GLD2), and a guide RNA containing at least one a spacer sequence specific for the target RNA, expression of a target RNA can be increased. Aptamer introduction into the gRNA with a cognate aptamer-binding protein fused to a translational activation domain can also be used. In one example, RNA aptamer sequences are appended to or inserted within the gRNA molecule, such as MS2, PP7, Qβ, and other aptamers. The introduction of proteins that specifically bind to these aptamers, e.g. the MS2 phage coat protein, fused to a translational activation domain can be used to target the target RNA because the Cas13d and gRNA complex will bring the aptamer protein-translational activation domain in proximity to the target RNA.

[0473] In some examples, such a method is used to increase the activity or expression of a target RNA, which will increase translation of the corresponding protein (if the RNA is a coding RNA). Such a method can be used in a cell where increased expression of an RNA is desired, such as a heterozygous genetic disease or disorders caused by copy number variation. Increasing translation of a desired protein product could be therapeutic in nature.

[0474] In another example, increasing the expression of a target RNA (such as Cyclin B1) can render the target cell (such as cancers) more sensitive to drugs (such as chemotherapeutic agents).

[0475] In one example, targeting the target RNA allows for one or more RNA base substitutions, RNA base edits, RNA base deletions, RNA base insertions, or combinations thereof, in the target RNA. In some examples, the Cas13d protein with a mutated HEPN domain is associated, either via direct fusion or a gRNA-aptamer modification, an effector domain that allows base edits (such as a cytidine deaminase, PPR protein, adenosine deaminase, ADAR family protein, or APOBEC family protein). In some examples, such a method is used to modify an RNA sequence, edit an RNA mutation, or modify an RNA transcript (e.g., gene therapy), for example to treat diseases such as ALS and melanoma or genetic disorders caused by undesired splice sites, such as Leber congenital amaurosis.

[0476] In one example, targeting the target RNA allows for methylating the target RNA. Some examples may use a chimeric Cas13d protein with a mutated HEPN domain (e.g., SEQ ID NO: 2 or 4) associated either via direct fusion or a gRNA-aptamer modification with a methylation domain (e.g., m6A), and a guide RNA containing at least one a spacer sequence specific for the target RNA. In some examples, such a method is used to combat aberrant RNA demethylation. In one example, such a method is used modify the methylation levels of pluripotency transcripts such as NANOG or KLF4 for example to decrease their stability in breast cancer cells, which can suppress the acquisition of breast cancer stem cell phenotypes that are associated with increased proliferation and cancer stem cell formation.

[0477] In one example, targeting the target RNA allows for demethylating the target RNA. Some examples can use Cas13d protein with a mutated HEPN domain (e.g., SEQ ID NO: 2 or 4), a guide RNA containing at least one a spacer sequence specific for the target RNA, and a demethylation domain (e.g., human alkylation repair homolog 5 or Alkbh5). The demethylation domain can be associated either via direct fusion to the Cas13d protein or via a gRNA-aptamer modification. In some examples, such a method is used to reverse aberrant RNA methylation, for example to treat myeloid leukemia by decreasing m⁶A levels.

[0478] In one example, targeting the target RNA allows for binding to the target RNA. For example, by using a Cas13d protein with a mutated HEPN domain (e.g., SEQ ID NO: 2 or 4) and a guide RNA containing at least one a spacer sequence specific for the target RNA, molecules can be bound or tethered to a target RNA. In some examples, such a method is used to capture the target RNA (e.g., immuno-precipitation). This can be used as part of a kit to identify the proteins interacting with a specific RNA transcript. In one example, an epitope tagged Cas13d (e.g. FLAG, HA, biotin, HALO tag) can be targeted to specific target RNAs and cross-linked via fixation (e.g. with paraformaldehyde or glutaraldehyde). Immunoprecipitation of Cas13d with an epitope-recognizing antibody allows for the identification of co-immunoprecipitated proteins via Western blot or mass spectrometry.

[0479] In another example, Cas13d can be fused to a biotin ligase (such as BirA) or a peroxidase (such as APEX2) in order to biotinylate proteins that interact with the target RNA. Labeled proteins can then be pulled down with streptavidin beads followed by mass spectrometry or Western blot.

[0480] In some examples, biotinylated Cas13d could be targeted to ribosomal RNA sequences with a gRNA. Streptavidin bead-mediated pulldown can be used to deplete rRNA for RNA sequencing library preparation.

[0481] In one example, targeting the target RNA allows for masking the target RNA. For example, by using an Cas13d protein with a mutated or intact HEPN domain and a guide RNA containing at least one a spacer sequence specific for the target RNA, a target RNA can be masked from RNA-binding proteins or RNA-binding elements such as miRNAs.

[0482] In some examples, the Cas13d can be used to mask RNA binding sites from RNA-binding proteins (RBPs). In another example, Cas13d can mask miRNA binding sites. For example, the liver-specific miR-122 forms a complex with Hepatitis C viral RNA which protects it from degradation. A HEPN-active Cas13d protein could be targeted to the miRNA-122 binding site on the viral RNA to synergistically combat HCV infections by simultaneously reversing miRNA-122-mediated protection and directly degrading HCV RNA. In some examples, such a method is used to preserve or protect the target RNA molecule, for example to protect the target RNA from degradation. For example, by targeting AU-rich elements in the 3′ UTR of a target gene, a HEPN-mutated Cas13d can block binding of RNA-binding proteins such as tristetraprolin (TTR) or AUF1, which lead to degradation of the target transcript.

[0483] In one example, targeting the target RNA allows for changing splicing of the target RNA. Both the direct binding of splice acceptor and/or donor sites as well as splice effector domains can be used to manipulate splicing. For example, by using an Cas13d protein with a mutated HEPN domain (e.g., SEQ ID NO: 2 or 4), a guide RNA containing at least one a spacer sequence specific for the target RNA, and optionally an effector domain that affects splicing (such as the RS-rich domain of SRSF1, the Gly-rich domain of hnRNP A1, the alanine-rich motif of RBM4, or the proline-rich motif of DAZAP1), alternative splicing of the RNA can be achieved.

[0484] In some examples, such a method is used for exon inclusion, for example to include exon 2 of acid alpha-glucosidase (GAA) to treat Pompe disease or to include exon 7 of SMN2 to treat spinal muscular atrophy (SMA). In some examples, such a method is used for exon exclusion, for example to restore the reading frame of dystrophin to treat Duchenne muscular dystrophy or to shift the splicing of the Bcl-x pre-mRNA from the antiapoptotic long isoform to the proapoptotic short isoform to treat cancer.

[0485] In some examples, the method uses the Cas13d protein with a mutated HEPN domain to mask splice acceptor or donor sites, for example to create neoantigens to make cold tumors hot. By affecting the splicing of certain target pre-mRNAs, this method can generate novel exon-exon junctions that can lead to the creation of neo-epitopes in cancer cells. This can make a cancer cell vulnerable to the immune system due to the display of unnatural antigens. In other examples, this method can be used to dynamically manipulate isoform ratios or to restore reading frame of a protein (e.g., dystrophin for Duchenne's muscular dystrophy).

[0486] In one example, targeting the target RNA allows for controlling transcript trafficking of the target RNA. For example, by using an Cas13d fusion protein with a mutated HEPN domain (e.g., SEQ ID NO: 2 or 4) and a subcellular localization signal or export sequence, a guide RNA containing at least one a spacer sequence specific for the target RNA. In some examples, such a method is used to traffic the target RNA molecule to a particular organelle or cytosolic compartment, or even export the target RNA transcript, for example to endosomes for extracellular release

[0487] In another example, the method can affect RNA trafficking. For example, the zipcode binding protein ZBP1 specifically recognizes an RNA sequence 5′-CGGAC(C/A-CA-C/U) that leads to localization of certain transcripts to the leading edge of fibroblasts. By masking or manipulating particular RNA zipcodes or regulatory sequences from recognition by regulatory protein complexes, this method can affect RNA localization or trafficking within a cell.

[0488] In one example, the target RNA is a nuclearly localized RNA. For example, by using an Cas13d protein with a non-mutated HEPN domain (e.g., SEQ ID NOS: 1, 3, 42, 62, 70, 82, 83, and 92) fused to a nuclear localization signal and a guide RNA containing at least one a spacer sequence specific for the target nuclear RNA, the nuclearly localized RNA can be targeted and degraded. In some examples, such a method is used to degrade the target nuclear RNA molecule, for example to knock-down a non-coding nuclear RNA such as HOTAIR, which is associated with metastatic progression in breast cancer.

[0489] In one example, the target RNA is viral RNA or transcript of a DNA virus. For example, an Cas13d protein with a non-mutated HEPN domain (e.g., SEQ ID NOS: 1, 3, 42, 62, 70, 82, 83, and 92) and a guide RNA containing at least one spacer sequence specific for the target RNA can be used. In some examples, such a method is used to treat an RNA viral infection (such as infection by a positive-strand RNA viruses, such as Picornaviruses (such as Aphthoviridae [for example foot-and-mouth-disease virus (FMDV)]), Cardioviridae; Enteroviridae (such as Coxsackie viruses, Echoviruses, Enteroviruses, and Polioviruses); Rhinoviridae (Rhinoviruses)); Hepataviridae (Hepatitis A viruses); Togaviruses (examples of which include rubella; alphaviruses (such as Western equine encephalitis virus, Eastern equine encephalitis virus, and Venezuelan equine encephalitis virus)); Flaviviruses (examples of which include Dengue virus, West Nile virus, and Japanese encephalitis virus); Calciviridae (which includes Norovirus and Sapovirus); or Coronaviruses (examples of which include SARS coronaviruses, such as the Urbani strain), or a negative-strand RNA virus, such as Orthomyxyoviruses (such as the influenza virus), Rhabdoviruses (such as Rabies virus), and Paramyxoviruses (examples of which include measles virus, respiratory syncytial virus, or parainfluenza viruses), or a DNA viral infection (such as infection by Herpesviruses (such as Varicella-zoster virus, for example the Oka strain; cytomegalovirus; and Herpes simplex virus (HSV) types 1 and 2), Adenoviruses (such as Adenovirus type 1 and Adenovirus type 41), Poxviruses (such as Vaccinia virus), or Parvoviruses (such as Parvovirus B19), for example by cutting the viral RNA or transcript of a DNA virus. Thus, such methods can be used as an RNA-based antiviral or antimicrobial.

### Example 1

### Materials and Methods

[0490] This example describes the materials and methods used to obtain the results shown in Examples 2-7.

### Cell Culture of Human Embryonic Kidney (HEK) Cell Line 293FT

[0491] Human embryonic kidney (HEK) cell line 293FT (Thermo Fisher) was maintained in DMEM (4.5 g/L glucose), supplemented with 10% FBS (GE Life Sciences) and 10 mM HEPES at 37° C. with 5% CO₂. Upon reaching 80-90% confluency, cells were dissociated using TrypLE Express (Life Technologies) and passaged at a ratio of 1:2.

### Cell Culture of Human Bone Osteosarcoma Epithelial Cell Line U2OS

[0492] Human bone osteosarcoma epithelial U20S were maintained in DMEM (4.5 g/L glucose) supplemented with 10% FBS and 10 mM HEPES at 37° C. with 5% CO₂. Cells were passaged at a 1:3 ratio upon reaching 70% confluence. This cell line was not authenticated.

### Maintenance of Induced Pluripotent Stem Cells and Neuronal Differentiation

[0493] Stable human iPSC lines containing the FTDP-17 IVS10+16 mutation or age- and sex-matched control lines were obtained from the laboratory of Fen-Biao Gao (Biswas et al., 2016). Briefly, cells obtained from one male patient with the MAPT IVS10+16 mutation and two separate lines from one male control patient were reprogrammed into hiPSCs (Almeida et al., 2012). iPSCs were transduced with lentivirus containing a doxycycline-inducible Ngn2 cassette. Lentiviral plasmids were a gift from S. Schafer and F. Gage. iPSCs were then passaged with Accutase and plated into a Matrigel-coated 6-well plate with mTESR media containing ROCK inhibitor Y-27632 (10 μM, Cayman) at 500,000 cells per well. On day 1, media was changed with mTESR. On day 2, media was changed to mTESR containing doxycycline (2 μg/ml, Sigma) to induce Ngn2 expression. On day 3, culture media was replaced with Neural Induction media (NIM, DMEM/F12 (Life Technologies) containing BSA (0.1 mg/ml, Sigma), apo-transferrin (0.1 mg/ml, Sigma), putrescine (16 μg/ml, Sigma), progesterone (0.0625 μg/ml, Sigma), sodium selenite (0.0104 μg/ml, Sigma), insulin (5 μg/ml, Roche), BDNF (10 ng/ml, Peprotech), SB431542 (10 μM, Cayman), LDN-193189 (0.1 μM, Sigma), laminin (2 μg/ml, Life Technologies), doxycycline (2 μg/ml, Sigma) and puromycin (Life Technologies)). NIM media was changed daily. Following 3 days of puromycin selection, immature neuronal cells were passaged with Accumax (Innovative Cell Technologies) and plated onto 96-well plates coated with poly-D-lysine and Matrigel in Neural Maturation media (NMM; 1:1 Neurobasal/DMEM (Life Technologies) containing B27 (Life Technologies), BDNF (10 ng/ml, Peprotech), N-Acetyl cysteine (Sigma), laminin (2 μg/ml, Life Technologies), dbcAMP (49 μg/ml, Sigma) and doxycycline (2 μg/ml, Sigma). Media was replaced the next day (day 7) with NMM containing AraC (2 μg/ml, Sigma) to eliminate any remaining non-differentiated cells. On day 8, AraC was removed and astrocytes were plated on top of neurons to support neuron cultures in NMM containing hbEGF (5 ng/ml, Peprotech). Cells were transduced with AAV on day 10 and assayed on day 24.

### Computational Pipeline for Cas13d Identification

[0494] We obtained whole genome, chromosome, and scaffold-level prokaryotic genome assemblies from NCBI Genome in June 2016 and compared CRISPRfinder, PILER-CR, and CRT for identifying CRISPR repeats. The 20 kilobase flanking regions around each putative CRISPR repeat was extracted to identify nearby proteins and predicted proteins using Python. Candidate Cas proteins were required to be >750 aa in length and within 5 proteins of the repeat array, and extracted CRISPR loci were filtered out if they contained Cas genes associated with known CRISPR systems such as types I-III CRISPR. Putative effectors were clustered into families via all-by-all BLASTp analysis followed by single-linkage hierarchical clustering where a bit score of at least 60 was required for cluster assignment. Each cluster of at least 2 proteins was subjected to BLAST search against the NCBI non-redundant (nr) protein database, requiring a bit score >200 to assign similarity. The co-occurrence of homologous proteins in each expanded cluster to a CRISPR array was analyzed and required to be >70%. Protein families were sorted by average amino acid length and multiple sequence alignment for each cluster was performed using Clustal Omega and the Geneious aligner with a Blosum62 cost matrix. The RxxxxH HEPN motif was identified in the Cas13d family on the basis of this alignment. TBLASTN was performed on all predicted Cas13d effectors against public metagenome whole genome shotgun sequences without predicted open reading frames (ORFs). The Cas13d family was regularly updated via monthly BLAST search on genome and metagenome databases to identify any newly deposited sequences. New full-length homologs and homologous fragments were aligned using Clustal Omega and clustered using PhyML 3.2. CRISPRDetect was used to predict the direction of direct repeats in the Cas13d array and DR fold predictions were performed using the Andronescu 2007 RNA energy model at 37° C. Sequence logos for Cas13d direct repeats were generated using Geneious 10.

### Protein Expression and Purification

[0495] Recombinant Cas13d proteins were PCR amplified from genomic DNA extractions of cultured isolates or metagenomic samples and cloned into a pET-based vector with an N-terminal His-MBP fusion and TEV protease cleavage site. The resulting plasmids were transformed into Rosetta2(DE3) cells (Novagen), induced with 200 μM IPTG at OD₆₀₀ 0.5, and grown for 20 hours at 18° C. Cells were then pelleted, freeze-thawed, and resuspended in Lysis Buffer (50 mM HEPES, 500 mM NaCl, 2 mM MgCl2, 20 mM Imidazole, 1% v/v Triton X-100, 1 mM DTT) supplemented with 1× protease inhibitor tablets, 1 mg/mL lysozyme, 2.5 U/mL Turbo DNase (Life Technologies), and 2.5 U/mL salt active nuclease (Sigma Aldrich). Lysed samples were then sonicated and clarified via centrifugation (18,000×g for 1 hour at 4° C.), filtered with 0.45 μM PVDF filter and incubated with 50 mL of Ni-NTA Superflow resin (Qiagen) per 10 L of original bacterial culture for 1 hour. The bead-lysate mixture was applied to a chromatography column, washed with 5 column volumes of Lysis Buffer, and 3 column volumes of Elution Buffer (50 mM HEPES, 500 mM NaCl, 300 mM Imidazole, 0.01% v/v Triton X-100, 10% glycerol, 1 mM DTT). The samples were then dialyzed overnight into TEV Cleavage Buffer (50 mM Tris-HCl, 250 mM KCl, 7.5% v/v glycerol, 0.2 mM TCEP, 0.8 mM DTT, TEV protease) before cation exchange (HiTrap SP, GE Life Sciences) and gel filtration (Superdex 200 16/600, GE Life Sciences). Purified, eluted protein fractions were pooled and frozen at 4 mg/mL in Protein Storage Buffer (50 mM Tris-HC, 1M NaCl, 10% glycerol, 2 mM DTT).

### Preparation of Guide and Target RNAs

[0496] Oligonucleotides carrying the T7 promoter and appropriate downstream sequence were synthesized (IDT) and annealed with an antisense T7 oligo for crRNAs and PCR-amplified for target and array templates. Homopolymer target RNAs were synthesized by Synthego. The oligo anneal and PCR templates were in vitro transcribed with the Hiscribe T7 High Yield RNA Synthesis kit (New England Biolabs) at 31° C. for 12 hours. For labeled targets, fluorescently labelled aminoallyl-UTP atto 680 (Jena Biosciences) was additionally added at 2 mM. Guide RNAs were purified with RNA-grade Agencourt AMPure XP beads (Beckman Coulter) and arrays and targets were purified with MEGAclear Transcription Clean-Up Kit (Thermo Fisher) and frozen at −80° C. For ssDNA and dsDNA targets, corresponding oligonucleotide sequences were synthesized (IDT) and either gel purified, or PCR amplified and then subsequently gel purified respectively.

### Biochemical Cleavage Reactions

[0497] Purified EsCas13d protein and guide RNA were mixed (unless otherwise indicated) at 2:1 molar ratio in RNA Cleavage Buffer (25 mM Tris pH 7.5, 15 mM Tris pH 7.0, 1 mM DTT, 6 mM MgCl2). The reaction was prepared on ice and incubated at 37° C. for 15 minutes prior to the addition of target at 1:2 molar ratio relative to EsCas13d. The reaction was subsequently incubated at 37° C. for 45 minutes and quenched with 1 μL of enzyme stop solution (10 mg/mL Proteinase K, 4M Urea, 80 mM EDTA, 20 mM Tris pH 8.0) at 37° C. for 15 minutes. The reaction was then denatured with 2×RNA loading buffer (2×: 13 mM Ficoll, 8M Urea, 25 mM EDTA), at 85° C. for 10 minutes, and separated on a 10% TBE-Urea gel (Life Technologies). Gels containing labeled targets were visualized on the Odyssey Imager (Li-Cor); unlabeled array or target cleavage gels were stained with SYBR Gold prior to imaging via Gel Doc EZ system (Bio-Rad).

### Transient Transfection of Human Cell Lines

[0498] Engineered Cas13 coding sequences were cloned into a standardized plasmid expression backbone containing an EF1a promoter and prepared using the Nucleobond Xtra Midi EF Kit (Machery Nagel) according to the manufacturer's protocol. NLS-LwaCas13a-msfGFP and PspCas13b-NES-HIV were PCR amplified from Addgene #103854, and #103862, respectively, a gift from Feng Zhang. Cas13d pre-gRNAs and gRNAs were cloned into a minimal backbone containing a U6 promoter. shRNAs and guides for LwaCas13a were cloned into the same backbone and position matched to their corresponding guide RNA at the 3′ of the target sequence. Matched gRNAs for PspCas13b were moved to the closest 5′-G nucleotide.

[0499] For transient transfection, HEK 293FT cells were plated at a density of 20,000 cells per well in a 96-well plate and transfected at >90% confluence with 200 ng of Cas13 expression plasmid and 200 ng of gRNA expression plasmid using Lipofectamine 2000 (Life Technologies) according to the manufacturer's protocol. Transfected cells were harvested 48-72 hours post-transfection for flow cytometry, gene expression analysis, or other downstream processing.

[0500] For reporter assays, HEK 293FT cells were transfected in 96-well format with 192 ng of Cas13d expression plasmid, 192 ng of guide expression plasmid, and 12 ng of mCherry expression plasmid with Lipofectamine 2000 (Life Technologies). Cells were harvested after 48 hours and analyzed by flow cytometry.

[0501] U2OS cells were plated at a density of 20,000 cells per well in a 96-well plate and transfected at >90% confluence with 100 ng of Cas13d expression plasmid using Lipofectamine 3000 (Life Technologies) according to the manufacturer's protocol and processed for immunocytochemistry after 48 h.

### Flow Cytometry

[0502] Cells were dissociated 48 hours post-transfection with TrypLE Express and resuspended in FACS Buffer (1×DPBS^{-/-}, 0.2% BSA, 2 mM EDTA). Flow cytometry was performed in 96-well plate format using a MACSQuant VYB (Miltenyi Biotec) and analyzed using FlowJo 10. RG6 was a gift from Thomas Cooper (Addgene plasmid #80167) and modified to replace EGFP with mTagBFP2. All represented samples were assayed with three biological replicates. In the mCherry reporter assay, data is representative of at least 20,000 gated events per condition. In the splicing reporter assay, data is representative of at least 2,500 gated events per condition.

### Gene Expression Analysis

[0503] Cells were lysed 48 hours post-transfection with DTT-supplemented RLT buffer and total RNA was extracted using RNeasy Mini Plus columns (Qiagen). 200 ng of total RNA was then reverse transcribed using random hexamer primers and Revertaid Reverse Transcriptase (Thermo Fisher) at 25° C. for 10 min, 37° C. for 60 min, and 95° C. for 5 min followed by qPCR using 2× Taqman Fast Advanced Master Mix (Life Technologies) and Taqman probes for GAPDH and the target gene as appropriate (Life Technologies and IDT). Taqman probe and primer sets were generally selected to amplify cDNA across the Cas13 or shRNA target site position to prevent detection of cleaved transcript fragments (see Table S4 of Konermann et al., Cell 173:1-12, 2018, herein incorporated by reference in its entirety). qPCR was carried out in 5 μL multiplexed reactions and 384-well format using the LightCycler 480 Instrument II (Roche). Fold-change was calculated relative to GFP-transfected vehicle controls using the ddCt method. One-way or two-way ANOVA with multiple comparison correction was used to assess statistical significance of transcript changes using Prism 7.

### Immunohistochemistry

[0504] For immunohistochemical analysis, U20S cells were cultured on 96-well optically clear plates (Greiner Bio-One), transfected as previously described, then fixed in 4% PFA (Electron Microscopy Sciences) diluted in PBS (Gibco) and washed with 0.3M glycine (Sigma) in PBS to quench PFA. Samples were blocked and permeabilized in a PBS solution containing 8% donkey serum (Jackson ImmunoResearch), 8% goat serum (Cell Signaling Technologies), and 0.3% Triton-X 100 (Sigma) for one hour, followed by primary antibody incubation in 1% BSA (Fisher Bioreagents), 1% goat serum, and 0.25% Triton-X overnight at 4° C. Samples were washed 3 times with PBS containing 0.1% BSA and 0.1% Triton-X 100 before incubating with fluorophore-conjugated secondary antibodies in PBS with 0.05% Triton-X 100 and 1% BSA at room temperature for one hour. Cells were washed with PBS with 0.1% Triton-X, stained with DAPI, and then covered with Mounting Media (Ibidi) before imaging. Primary antibody, HA-Tag 6E2 (Cell Signaling, 2367), was used at a 1:100 dilution as per manufacturer's instructions. Secondary antibodies used were goat anti-mouse IgG1-Alexa-Fluor 647 (Thermo Fisher, A21240) and Anti-Mouse IgG1 CF 633 (Sigma, SAB4600335). Confocal images were taken using a Zeiss Airyscan LSM 880 followed by image processing in Zen 2.3 (Zeiss).

### Bacterial Small RNA Sequencing and Analysis

[0505] E. coli DH5a cells were transformed with pACYC184 carrying the CRISPR-Cas13d locus derived from an uncultured Ruminococcus sp. strain. Cells were harvested in stationary phase, rinsed in PBS, resuspended in TRIzol (Life Technologies), transferred to Lysing Matrix B tubes containing 0.1 mm silica beads (MP Biomedicals), and homogenized on a Bead Mill 24 (Fisher Scientific) for three 30-second cycles. Total RNA was isolated by phenol-chloroform extraction, then purified using the DirectZol Miniprep Kit (Zymo Research). RNA quality was assessed on an Agilent 2200 Tapestation followed by Turbo DNase treatment (Ambion). Total RNA was treated with T4 Polynucleotide Kinase (NEB) and rRNA-depleted using the Ribo-Zero rRNA Removal Kit for bacteria (Illumina). RNA was treated with RNA 5′ polyphosphatase, poly(A)-tailed with E. coli poly(A) polymerase, and ligated with 5′ RNA sequencing adapters using T4 RNA ligase 1 (NEB). cDNA was generated via reverse transcription using an oligo-dT primer and M-MLV RT/RNase Block (AffinityScript, Agilent) followed by PCR amplification and barcoding. Resulting libraries were sequenced on Illumina MiSeq, demultiplexed using custom Python scripts, and aligned to the Cas13d CRISPR locus using Bowtie 2. Alignments were visualized with Geneious.

### Ngn2 Lentivirus Preparation

[0506] Low passage HEK 293FT cells were transfected with Polyethylenimine Max (PEI, Polysciences) and Ngn2 target plasmid plus pMDG.2 and psPAX2 packaging plasmids (a gift from Didier Trono, Addgene #12259 and #12260) in DMEM+10% FBS media during plating. The following day, media was changed to serum-free chemically defined minimal medium (Ultraculture supplemented with Glutamax, Lonza). Viral supernatant was harvested 48 h later, clarified through a 0.45 micron PVDF filter (Millipore) and concentrated using ultracentrifugation.

### AAV Preparation

[0507] Low passage HEK 293FT cells were transfected with Polyethylenimine Max (PEI, Polysciences) and AAV target plasmid plus AAV1 serotype and pAdDeltaF6 helper packaging plasmids (UPenn Vector Core) in DMEM+10% FBS media during plating. The following day, 60% of the media was changed to chemically defined minimal medium (Ultraculture supplemented with Glutamax, Lonza). 48 h later, AAV-containing supernatant was harvested and clarified through a 0.45 μm PVDF filter (Millipore) and concentrated using precipitation by polyethylene glycol (PEG virus precipitation kit #K904, Biovision) following the manufacturer's protocol.

### RNA-Seq Library Preparation and Sequencing

[0508] 48 h after transfection, total RNA was extracted from 293FT cells using the RNeasy Plus Mini kit from Qiagen. Stranded mRNA libraries were prepared using the NEBNext II Ultra Directional RNA Library Prep Kit from New England Biolabs (Cat# E7760S) and sequenced on an Illumina NextSeq500 with 42 nt paired end reads. ˜15M total reads were demultiplexed per condition.

### RNA-Seq Analysis

[0509] Sequenced reads were quality-tested using FASTQC and aligned to the hg19 human genome using the 2.5.1 b STAR aligner (Dobin et al., 2013). Mapping was carried out using default parameters (up to 10 mismatches per read, and up to 9 multi-rmapping locations per read). The genome index was constructed using the gene annotation supplied with the hg19 Illumina iGenomes collection (Illumina) and sjdbOverhang value of 100. Uniquely mapped reads were quantified across all gene exons using the top-expressed isoform as proxy for gene expression with the HOMER analysis suite (Heinz et al., 2010), and differential gene expression was carried out with DESeq2 v 1.14.1 (Love et al., 2014) using triplicates to compute within-group dispersion and contrasts to compare between targeting and non-targeting conditions. Significant differentially expressed genes were defined as having a false discovery rate (FDR) <0.01 and a log 2 fold change >0.75. Volcano plots were generated in R 3.3.2 using included plotting libraries and the alpha( ) color function from the scales 0.5.0 package.

### Statistics

[0510] All values are reported as mean±SD or mean±SEM as indicated in the appropriate figure legends. For comparing two groups, a one-tailed student's t-test was used and statistical significance was determined using the Holm-Sidak method with alpha=0.05. A one-way ANOVA with Tukey multiple hypothesis correction was used to assess significance between more than two groups. Two-way ANOVA was used when comparing across two factors (i.e., RNA targeting modality and guide position) and adjusted for multiple hypothesis correction by Sidak's multiple comparisons test. For comparing groups that were found to not meet the assumption of a normal distribution by a D'Agostino and Pearson normality test, the non-parametric Friedman test with Dunn's multiple comparison adjustment was performed. PRISM 7.0 was used for all statistical analysis. Sample sizes were not determined a priori. At least three biological replicates were used for each experiment, as indicated specifically in each figure.

[0511] Sequencing data reported herein can be found in the NCBI Gene Expression Omnibus under GEO Series accession number GSE108519.

[0512] Additional details on the materials and methods used, such as sequences (e.g., Tables S1 to S5), can be found in Konermann et al., Cell 173:1-12, 2018, herein incorporated by reference in its entirety.

### Example 2

### Computational Identification of a Type VI-Like Cas Ribonuclease Family

[0513] This example describes methods used to identify previously undetected or uncharacterized RNA-targeting CRISPR-Cas systems by developing a computational pipeline for class 2 CRISPR-Cas loci, which require only a single nuclease for CRISPR interference such as Cas9, Cas12a (formerly Cpf1), or Cas13a (formerly C2c2) (Makarova et al., 2015; Shmakov et al., 2015). To improve upon previous strategies for bioinformatic mining of CRISPR systems, which focus on discovering sets of conserved Cas genes involved in spacer acquisition (Shmakov et al., 2015), the minimal requirements for a CRISPR locus to be the presence of a CRISPR repeat array and a nearby effector nuclease were defined. Using the CRISPR array as a search anchor, all prokaryotic genome assemblies and scaffolds were obtained from the NCBI WGS database and adapted algorithms for de novo CRISPR array detection (Bland et al., 2007; Edgar, 2007; Grissa et al., 2007) to identify 21,175 putative CRISPR repeat arrays (FIG. 1A).

[0514] Up to 20 kilobases (kb) of genomic DNA sequence flanking each CRISPR array was extracted to identify predicted protein-coding genes in the immediate vicinity. Candidate loci containing signature genes of known class 1 and class 2 CRISPR-Cas systems such as Cas3 or Cas9 were excluded from further analysis, except for Cas12a and Cas13a to judge the ability of the pipeline to detect and cluster these known class 2 effector families. To identify new class 2 Cas effectors, it was required that candidate proteins be >750 residues in length and within 5 protein-coding genes of the repeat array, as large proteins closely associated with CRISPR repeats are key characteristics of known single effectors. The resulting proteins were classified into 408 putative protein families using single-linkage hierarchical clustering based on homology.

[0515] To discard protein clusters that reside in close proximity to CRISPR arrays due to chance or overall abundance in the genome, additional homologous proteins to each cluster were identified from the NCBI non-redundant protein database and their proximity to a CRISPR array determined. Reasoning that true Cas genes would have a high co-occurrence rate with CRISPR repeats, >70% of the proteins for each expanded cluster were required to exist within 20 kb of a CRISPR repeat. These remaining protein families were analyzed for nuclease domains and motifs.

[0516] Among the candidates, which include the recently described Cas13b system (Smargon et al., 2017), a family of uncharacterized putative class 2 CRISPR-Cas systems encoding a candidate CRISPR-associated ribonuclease containing 2 predicted HEPN ribonuclease motifs (Anantharaman et al., 2013) were identified (FIG. 2A). Importantly, they are among the smallest class 2 CRISPR effectors described to date (˜930 aa). The Type VI CRISPR-Cas13 superfamily is exemplified by sequence-divergent, single-effector signature nucleases and the presence of two HEPN domains. Other than these two RxxxxH HEPN motifs (FIG. 3A), the candidate effectors have no significant sequence similarity to previously described Cas13 enzymes, so his family of putative CRISPR ribonucleases is designated as Type VI Cas13d, or Type VI-D (FIG. 3B).

[0517] CRISPR-Cas13d systems are derived from gut-resident microbes, so we sought to expand the Cas13d family via alignment to metagenomic contigs from recent large-scale microbiome sequencing efforts. Comparison of Cas13d proteins against public metagenome sequences without predicted open reading frames (ORFs) identified additional full-length systems as well as multiple effector and array fragments that cluster in several distinct branches (FIG. 1B). To generate full-length Cas13d ortholog proteins and loci from the different branches of the Cas13d protein family, genomic DNA samples we43 obtained from associated assemblies and performed targeted Sanger sequencing to fill in gaps due to incomplete sequencing coverage, such as for the metagenomic ortholog ‘Anaerobic digester metagenome’ (Adm) (Treu et al., 2016).

[0518] Cas13d CRISPR loci are largely clustered within benign, Gram-positive gut bacteria of the genus Ruminococcus, and exhibit a surprising diversity of CRISPR locus architectures (FIG. 2A). With the exception of the metagenomic AdmCas13d system, Cas13d systems lack the key spacer acquisition protein Cas1 (Yosef et al., 2012) within their CRISPR locus, highlighting the utility of a class 2 CRISPR discovery pipeline without Cas1 or Cas2 gene requirements. Cas13d direct repeats (DRs) are highly conserved in length and predicted secondary structure (FIG. 3C), with a 36 nt length, an 8-10 nt stem with A/U-rich loop, and a 5′-AAAAC motif at the 3′ end of the direct repeat (FIG. 3D). This conserved 5′-AAAAC motif has been shown to be specifically recognized by a type II Cas1/2 spacer acquisition complex (Wright and Doudna, 2016). In fact, Cas1 can be found in relative proximity to some Cas13d systems (within 10-30 kb for P1E0 and Rfx) while the remaining Cas13d-containing bacteria contain Cas1 elsewhere in their genomes, likely as part of another CRISPR locus.

### Example 3

### CRISPR-Cas13d Possesses Dual RNase Activities

[0519] To demonstrate that the Cas13d repeat array is transcribed and processed into CRISPR guide RNAs (gRNA), the Cas13d CRISPR locus was cloned from an uncultured Ruminococcus sp. sample (Ur) into a bacterial expression plasmid. CRISPR systems tend to form self-contained operons with the necessary regulatory sequences for independent expression, facilitating heterologous expression in E. coli (Gasiunas et al., 2012). RNA sequencing (Heidrich et al., 2015) revealed processing of the array into ˜52 nt mature gRNAs, with a 30 nt 5′ direct repeat followed by a variable 3′ spacer that ranged from 14-26 nt in length (FIG. 2B).

[0520] To characterize Cas13d properties in vitro, Eubacterium siraeum Cas13d protein (EsCas13d) was purified based on its robust recombinant expression in E. coli (FIGS. 4A-4C) and found that EsCas13d was solely sufficient to process its matching CRISPR array into constituent guides without additional helper ribonucleases (FIG. 2C, Table S1 of Konermann et al., “Transcriptome Engineering with RNA-Targeting Type VI-D CRISPR Effectors,” Cell 173:1-12, 2018, herein incorporated by reference in its entirety), a property shared by some class 2 CRISPR-Cas systems (East-Seletsky et al., 2016; Fonfara et al., 2016; Smargon et al., 2017). Furthermore, inactivating the positively charged catalytic residues of the HEPN motifs (Anantharaman et al., 2013) (dCas13d: R295A, H300A, R849A, H854A) did not affect array processing, indicating a distinct RNase activity dictating gRNA biogenesis analogous to Cas13a (East-Seletsky et al., 2016; Liu et al., 2017).

[0521] Cas effector proteins typically form a binary complex with mature gRNA to generate an RNA-guided surveillance ribonucleoprotein capable of cleaving foreign nucleic acids for immune defense (van der Oost et al., 2014). To assess if Cas13d has programmable RNA targeting activity as indicated by the presence of two HEPN motifs, EsCas13d protein was paired with an array or a mature gRNA along with a cognate in vitro-transcribed target. Based on the RNA sequencing results, a mature gRNA containing a 30 nt direct repeat and an intermediate spacer length of 22 nt was selected (nucleotides 6-36 of SEQ ID NO: 129, followed by 22 bases complementary to the RNA target).

[0522] Cas13d was able to efficiently cleave the complementary target ssRNA with both the unprocessed array and mature gRNA in a guide-sequence dependent manner, while non-matching spacer sequences abolished Cas13d activity (FIG. 5A). Substitution with dCas13d or the addition of EDTA to the cleavage reaction also abolished guide-dependent RNA targeting, indicating that Cas13d targeting is HEPN- and Mg²⁺-dependent (FIG. 5B). To determine the minimal spacer length for efficient Cas13d targeting, a series of spacer truncations ranging from the unprocessed 30 nt length down to 10 nt were generated (FIG. 6A). Cleavage activity dropped significantly below a 21 nt spacer length, confirming the choice of a 22 nt spacer (FIG. 6B).

[0523] RNA-targeting class 2 CRISPR systems have been proposed to act as sensors of foreign RNAs (Abudayyeh et al., 2016; East-Seletsky et al., 2016), where general RNase activity of the effector nuclease is triggered by a guide-matching target. To assay for a similar property in Cas13d, RNase activity of the binary EsCas13d:gRNA complex was monitored in the presence of a matching RNA target. It was observed that EsCas13d can be activated by target RNA to cleave bystander RNA targets (FIG. 3C), albeit inefficiently relative to its activity on the complementary ssRNA target. Bystander cleavage is guide sequence- and HEPN-dependent, as the presence of non-matching bystander target alone was insufficient to induce cleavage while substitution of dCas13d or addition of EDTA abolished activity. These results indicate that bystander RNase activity may be a general property of RNA-targeting class 2 systems in CRISPR adaptive bacterial immunity (FIG. 3D).

[0524] To assess the generalizability of Cas13d reprogramming, twelve guides tiling a complementary RNA target were generated and efficient cleavage in all cases was observed (FIG. 7A). Cas13d was unable to cleave a ssDNA (FIG. 6C) or dsDNA (FIG. 6D) version of the ssRNA target, indicating that Cas13d is an RNA-specific nuclease. Further, RNA target cleavage did not depend on the protospacer flanking sequence (PFS) (FIG. 7A) in contrast to other RNA-targeting class 2 systems, which require a 3′-H (Abudayyeh et al., 2016) or a double-sided, DR-proximal 5′-D and 3′-NAN or NNA (Smargon et al., 2017). Although a slight bias against an adenine PFS was initially observed (FIG. 6E), varying the target PFS base with a constant guide sequence resulted in no significant differences (P=0.768) in targeting efficiency (FIG. 6F).

[0525] While DNA-targeting class 2 CRISPR systems (Gasiunas et al., 2012; Jinek et al., 2012; Zetsche et al., 2015) and some RNA-targeting class 1 systems tend to cleave at defined positions relative to the target-guide duplex (Samai et al., 2015; Zhang et al., 2016), the Cas13d cleavage pattern varies for different targets (FIGS. 5A, 5C, 6H) and remains remarkably similar despite the guide sequence position (FIG. 7A). This indicates that Cas13d may preferentially cleave specific sequences or structurally accessible regions in the target RNA. Cas13d was tested activity on targets containing variable homopolymer repeats in the loop region of a hairpin or as a linear single-stranded repeat. EsCas13d exhibited significant preference for uracil bases in both target structures, with lower but detectable activity at all other bases (FIG. 7B).

[0526] Cas enzymes are found in nearly all archaea and about half of bacteria (Hsu et al., 2014; van der Oost et al., 2014), spanning a wide range of environmental temperatures. To determine the optimal temperature range for Cas13d activity, a spectrum of cleavage temperature conditions from 16-62° C. was tested and observed maximal activity in the 24-41° C. range (FIGS. 6G, 6H). This temperature range is compatible with a wide range of prokaryotic and eukaryotic hosts, indicating Cas13d can be adapted for RNA targeting in different cells and organisms.

### Example 4

### Cell-Based Activity Screen of Engineered Orthologs

[0527] The Cas13d nuclease was used as a flexible tool for programmable RNA targeting in mammalian cells. CRISPR orthologs from distinct bacterial species commonly exhibit variable activity (Abudayyeh et al., 2017; East-Seletsky et al., 2017), especially upon heterologous expression in human cells (Ran et al., 2015; Zetsche et al., 2017). Highly active Cas13d orthologs were identified in a eukaryotic cell-based mCherry reporter screen.

[0528] By synthesizing human codon-optimized versions of 7 orthologs from distinct branches within the Cas13d family (FIG. 1B), mammalian expression plasmids carrying the catalytically active and HEPN-inactive proteins were generated. Each protein was then optionally fused to N- and C-terminal nuclear localization signals (NLS). These Cas13d effector designs were HA-tagged and paired with two distinct guide RNA architectures, either with a 30 nt spacer flanked by two direct repeat sequences to mimic an unprocessed guide RNA (pre-gRNA) or a 30 nt direct repeat with 22 nt spacer (gRNA) predicted to mimic mature guide RNAs (FIG. 8A). For each guide design, four distinct spacer sequences complementary to the mCherry transcript were then pooled to minimize potential spacer-dependent variability in targeting efficiency. The ability of Cas13d to knockdown mCherry protein levels was determined in a human embryonic kidney (HEK) 293FT cell-based reporter assay.

[0529] 48 hours post-transfection, flow cytometry indicated that RfxCas13d and AdmCas13d efficiently knocked down mCherry protein levels by up to 92% and 87% (P<0.0003), respectively, relative to a non-targeting control guide (FIG. 8B). In contrast, EsCas13d along with RaCas13d and RffCas13d exhibited limited activity in human cells. Furthermore, none of the HEPN-inactive Rfx-dCas13d constructs significantly affected mCherry fluorescence, indicating HEPN-dependent knockdown (P>0.43 for all cases). Robust nuclear translocation of the Rfx and AdmCas13d NLS fusion constructs was observed via immunocytochemistry, while the wild-type effectors remain primarily extra-nuclear (FIG. 8C).

[0530] Proceeding with RfxCas13d and AdmCas13d as lead candidates, we next compared their ability to knockdown endogenous transcripts. To determine the optimal ortholog and guide architecture, the capability of Rfx and AdmCas13d construct variants to target β-1,4-N-acetyl-galactosaminyl transferase 1 (B4GALNT1) transcripts was systematically assayed. In each condition, four guides containing distinct spacer sequences tiling the B4GALNT1 transcript were pooled. The RfxCas13d-NLS fusion targeted B4GALNT1 more efficiently than wild-type RfxCas13d and both variants of AdmCas13d, with both the gRNA and pre-gRNA mediating potent knockdown (˜82%, P<0.0001) (FIG. 8D). Cas13d-NLS from Ruminococcus flavefaciens strain XPD3002 was therefore selected for the remaining experiments (CasRx).

### Example 5

### Programmable RNA Knockdown in Human Cells with CasRx

[0531] Because Cas13d is capable of processing its own CRISPR array, this property was leveraged for the simultaneous delivery of multiple targeting guides in a simple single-vector system (FIG. 9A). Arrays encoding four spacers that each tile the transcripts of mRNAs (B4GALNT1 and ANXA4) or nuclear localized lncRNAs (HOTTIP and MALAT1) consistently facilitated robust (>90%) RNA knockdown by CasRx (P<0.0001) (FIG. 9B).

[0532] CasRx was compared to more established technologies for transcript knockdown or repression, by comparing CasRx-mediated RNA interference to dCas9-mediated CRISPR interference (Gilbert et al., 2014; Gilbert et al., 2013) and spacer sequence-matched shRNAs via transient transfection (FIG. 9C). For CRISPRi-based repression, the most potent dCas9 guide for B4GALNT1 from previous reports was analyzed (Gilbert et al., 2014; Zalatan et al., 2015). Across 3 endogenous transcripts, CasRx outperformed shRNAs (11/11) and CRISPRi (4/4) in each case (FIG. 9D), exhibiting a median knockdown of 96% compared to 65% for shRNA and 53% for CRISPRi after 48 hours. In addition, knockdown by CasRx was compared to two recently described Cas13a and Cas13b effectors (Abudayyeh et al., 2017; Cox et al., 2017) (FIG. 10A). Across three genes and eight guide RNAs, CasRx mediated significantly greater transcript knockdown than both LwaCas13a-msfGFP-NLS and PspCas13b-NES (median: 97% compared to 80% and 66% respectively, P<0.0001) (FIG. 10B).

[0533] RNAi has been widely used to disrupt any gene of interest due to a combination of simple re-targeting principles, scalable synthesis, knockdown potency, and ease of reagent delivery. However, widespread off-target transcript silencing has been a consistent concern (Jackson et al., 2003; Sigoillot et al., 2012), possibly due to the entry of RNAi reagents into the endogenous miRNA pathway (Doench et al., 2003; Smith et al., 2017). Consistent with these reports, upon RNA sequencing of human cells transfected with a B4GALNT1-targeting shRNA, widespread off-target transcriptional changes relative to a non-targeting shRNA were observed (>500 significant off-target changes, P<0.01, FIGS. 9E, 9G). In contrast, transcriptome profiling of spacer-matched CasRx guide RNAs revealed no significant off-target changes other than the targeted transcript (FIG. 9F). This indicates that the moderate bystander cleavage observed in vitro (FIG. 5C) may not result in observable off-target transcriptome perturbation in mammalian cells. A similar pattern was observed when targeting ANXA4 (FIGS. 11A-11B), with over 900 significant off-target changes resulting from shRNA targeting compared to zero with CasRx (FIG. 9G).

[0534] To confirm that CasRx interference is broadly applicable, a panel of 11 additional genes with diverse roles in cancer, cell signaling, and epigenetic regulation were selected and 3 guides per gene were screened. CasRx consistently mediated high levels of transcript knockdown across genes with a median reduction of 96% (FIG. 9H). Each tested guide mediated at least 80% knockdown, underscoring the consistency of the CasRx system for RNA interference.

### Example 6

### Splice Isoform Engineering with dCasRx

[0535] The experiments on RNA targeting with CasRx revealed that target RNA and protein knockdown is dependent on the catalytic activity of the HEPN domains (FIGS. 8B, 5B). The same guide sequences mediating efficient knockdown with CasRx failed to significantly reduce mCherry levels when paired with catalytically inactive dCasRx (FIG. 8B), indicating that targeting of dCasRx to the coding portion of mRNA does not necessarily perturb protein translation. This observation indicated the possibility of utilizing dCasRx for targeting of specific coding and non-coding elements within a transcript to study and manipulate RNA. To validate this concept, the utility of the dCasRx system was expanded by creating a splice effector.

[0536] Alternative splicing is generally regulated by the interaction of cis-acting elements in the pre-mRNA with positive or negative trans-acting splicing factors, which can mediate exon inclusion or exclusion (Matera and Wang, 2014; Wang et al., 2015). It was reasoned that dCasRx binding to such motifs may be sufficient for targeted isoform perturbation. For proof-of-concept, distinct splice elements were identified in a bichromatic splicing reporter containing DsRed upstream of mTagBFP2 in two different reading frames following an alternatively spliced exon (Orengo et al., 2006) (FIG. 12A). Inclusion or exclusion of this second exon toggles the reading frame and resulting fluorescence, facilitating quantitative readout of splicing patterns by flow cytometry. To mediate exon skipping, four guide RNAs were designed to target the intronic branchpoint nucleotide, splice acceptor site, putative exonic splice enhancer, and splice donor of exon 2.

[0537] One widespread family of negative splice factors are the highly conserved heterogeneous nuclear ribonucleoproteins (hnRNPs), which typically inhibit exon inclusion via a C-terminal, glycine-rich domain (Wang et al., 2015). The splicing reporter was targeted with dCasRx and engineered fusions to the Gly-rich C-terminal domain of hnRNPa1, one of the most abundant hnRNP family members (FIG. 12B).

[0538] Guide position appears to be a major determinant of the efficiency of engineered exon skipping. While each guide position mediated a significant increase in exon exclusion (P<0.0001 in all cases) relative to the non-targeting guide, targeting the splice acceptor resulted in the most potent exon exclusion (increase from 8% basal skipping to 65% for dCasRx alone and 75% with hnRNPa1 fusion). By comparison, dLwaCas13a-msfGFP-NLS mediated significantly lower levels of exon skipping across all four positions (19% skipping for splice acceptor guide) (FIGS. 10C and 10D, P<0.0001).

[0539] Targeting all 4 positions simultaneously with a CRISPR array achieved higher levels of exon skipping than individual guides alone (81% for dCasRx and 85% for hnRNPa1 fusion, P<0.006 compared to SA guide) (FIG. 12B). These results indicate that dCasRx allows for tuning of isoform ratios through varying guide placement and suggest that it can be leveraged as an efficient RNA binding module in human cells for targeting and manipulation of specific RNA elements.

### Example 7

### Viral Delivery of dCasRx to a Neuronal Model of Frontotemporal Dementia

[0540] The Cas13d family averages 930 amino acids in length, in contrast to Cas9 (˜1100 aa to ˜1400 aa depending on subtype, with compact outliers such as CjCas9 or SaCas9), Cas13a (1250 aa), Cas13b (1150 aa), and Cas13c (1120 aa) (FIG. 3B) (Chylinski et al., 2013; Cox et al., 2017; Hsu et al., 2014; Kim et al., 2017; Shmakov et al., 2015; Smargon et al., 2017). Although adeno-associated virus (AAV) is a versatile vehicle for transgene delivery and gene therapy due to its broad range of capsid serotypes, low levels of insertional mutagenesis, and lack of apparent pathogenicity, its limited packaging capacity (˜4.7 kb) makes it challenging to effectively deliver many single effector CRISPR enzymes (Abudayyeh et al., 2017; Ran et al., 2015; Swiech et al., 2015). The remarkably small size of Cas13d effectors render them uniquely suited for all-in-one AAV delivery with a CRISPR array, an optional effector domain, and requisite expression or regulatory elements (FIG. 12C).

[0541] Frontotemporal Dementia with Parkinsonism linked to Chromosome 17 (FTDP-17) is an autosomal dominant major neurodegenerative disease caused by diverse point mutations in MAPT, the gene encoding for tau. Tau exists as two major isoforms in human neurons, 4R and 3R, which are distinguished by the presence or absence of tau exon 10 and thus contain 4 or 3 microtubule binding domains. The balance of these two isoforms is generally perturbed in FTDP-17 as well as other tauopathies, driving the progression of neurodegeneration (Boeve and Hutton, 2008). Some forms of FTD are caused by mutations in the intron following MAPT exon 10 which disrupt an intronic splice silencer and elevate the expression of 4R tau (Kar et al., 2005), thereby inducing pathological changes (Schoch et al., 2016).

[0542] It was reasoned that dCasRx targeted to MAPT exon 10 could induce exon exclusion to alleviate dysregulated 4R/3R tau ratios. Patient-derived human induced pluripotent stem cells (hiPSCs) were differentiated into cortical neurons via Neurogenin-2 directed differentiation for 2 weeks (Zhang et al., 2013). Postmitotic neurons were then transduced with AAV1 carrying dCasRx (FIG. 12D) paired with a repeat array containing 3 spacers that target the exon 10 splice acceptor and two putative exonic splice enhancers (FIG. 12E). dCasRx-mediated exon exclusion was able to reduce the relative 4R/3R tau ratio by nearly 50% relative to a BFP vehicle control (FIG. 12F) and to a level similar to unaffected control neurons, demonstrating that CasRx can be exploited for transcriptional modulation in primary cell types via AAV delivery.

### Example 8

### RNA Targeting in Human Cells Using Cas13d

[0543] RNA can be targeted in human cells using the active Cas13d nuclease. As a proof of concept, human U-2 OS bone osteosarcoma cells were stably integrated with an mCherry reporter and transfected with plasmids encoding human codon optimized Cas13d and guide RNAs targeting the mCherry transcript (FIG. 13).

[0544] Cas13d proteins were also fused with N- and C-terminal NLS sequences (SPKKKRKVEAS, SEQ ID NO: 256, for the N-terminal NLS and GPKKKRKVAAA, SEQ ID NO: 258, C-terminal NLS) to understand if nuclear localization can affect mCherry knockdown (these are denoted the 2×NLS constructs). Guide RNAs were either provided in a vector with a U6 promoter operably linked to a 36 nt DR-30 nt spacer-36 nt DR sequence, which mimics the unprocessed CRISPR guide array (denoted DR36), or to a 30 nt DR-22 nt spacer to mimic the processed, mature gRNA (denoted gRNA). The DR36 construct is presumed to be processed by Cas13d into mature gRNAs within the cell. The spacer sequences within the DR36 or gRNA molecules were either complementary to the mCherry target RNA (on-target mCherry) or computationally optimized to avoid complementarity to mCherry or any endogenous human transcript (non-targeting mCherry).

[0545] mCherry knockdown was quantified via flow cytometry and normalized to a transfection control. The non-targeting mCherry guides do not affect mCherry protein levels via flow cytometry, presumably because the mCherry transcripts are not targeted. However, the on-target mCherry guides paired with 4 different Cas13d orthologues exhibited significant mCherry knockdown (FIG. 13). “XPD” refers to Ruminococcus flavefaciens XPD3002 Cas13d; “P1E0” refers to Gut metagenome P1E0 Cas13d; “AnDig” refers to Anaerobic digester gut metagenome Cas13d; “Uncultured” refers to uncultured Ruminococcus sp. Cas13d.

### Example 9

### In Vivo RNA Targeting Using Cas13d

[0546] RNA can be targeted in mouse models of cancer. To observe which cells in the mouse are expressing EGFR, a guide RNA is designed that includes one or more spacer regions complementary to mouse EGFR and is combined with Cas13d having a mutated HEPN domain (such as SEQ ID NO: 2 or 4), and a biotin label. The gRNA and Cas13d coding sequence are cloned into a viral vector (such as a lentivirus) which is used to infect the mice by tail vein injection at a titer to insure 100% infection rates. A fluorescent streptavidin label is administered to the mice. Cells expressing EGFR are visualized and detected with the appropriate excitation frequency for the fluorescent label. Alternatively, Cas13d is delivered in its active form in vivo to mediate target knock-down.

### Example 10

### Treatment of Cancer

[0547] Human subjects with histologically confirmed stage 1, EGFR+ breast cancer can be treated with the disclosed methods. Each subject is administered a complex comprising an active Cas13d or a Cas13d protein mutated in the HEPN domain (such as SEQ ID NO: 2 or 4), a guide RNA targeting EGFR, and a toxin, after receiving lumpectomy surgery. Treated individuals are monitored for breast cancer recurrence.

### Example 11

### Treatment of HIV Infection

[0548] Human subjects with HIV infection can be treated with the disclosed methods. Each subject is administered a construct comprising an active Cas13d or a Cas13d protein mutated in the HEPN domain (such as SEQ ID NO: 2 or 4), a guide RNA targeting HIV Nef protein, and a toxin. Treated individuals are monitored for HIV progression.

### Example 12

### Treatment of Huntington's Disease

[0549] Human subjects with Huntington's Disease can be treated with the disclosed methods. Each individual is administered a construct comprising Cas13d, a guide RNA targeting the Huntington mutation. Treated individuals are monitored for disease progression.

### Example 13

### Alternative Splicing Using Cas13d

[0550] Cas13d splice effectors can be used for therapeutic protein restoration (for example that results from a mutation or deletion), gene knockdown via frameshift induction, tuning or restoring a desired isoform ratio, or inducing a desired dominant splice isoform (FIG. 14). Alternative splicing is generally regulated by the interaction of cis-acting elements in the pre-mRNA with positive or negative trans-acting splicing factors, which can mediate exon inclusion or exclusion. dCas13d and Cas13d, with optional fusion to positive or negative splicing factors, can be used as splicing effectors that target to said cis-acting elements in the pre-mRNA to manipulate splicing. Such elements can include exonic splicing enhancers or suppressors, intronic splicing enhancers or suppressors, splice acceptor and splice donor sites, and more generally protein- or RNA-interacting motifs or elements on that particular pre-mRNA, mRNA, or other RNA species, such as a non-coding RNA, tRNA, miRNA, and the like.

[0551] Additionally, that the effects of Cas13d-based splice effectors can be guide position-dependent. This can be exploited to perturb or discover particular motifs or sites in an RNA transcript such as protein-binding sites, via steric hindrance, blocking, recruitment, or effector-mediated interaction. For example, the interaction between non-coding RNAs and particular chromatin remodeling complexes can be perturbed. Access of the ribosomal binding site and other elements can be blocked in a 5′ or 3′ UTR (or to recruit appropriate effector domains) to decrease, increase, or otherwise manipulate translation.

[0552] Targeting or tiling Cas13d guides along a pre-mRNA can be used to discover or map new cis-acting elements such as intronic or exonic splice enhancers. This has been exploited in a therapeutic context in the case of the dystrophin gene for optimal antisense oligonucleotide positioning and can also be used for optimal Cas13d positioning. This can be also used to map, mask, or otherwise perturb RNA zipcodes or other cis-acting elements to affect trafficking and localization, chromatin remodeling, polyadenylation, RNA stability and half-life, or levels of nonsense-mediated decay.

[0553] In one example, targeting an RNA allows for changing splicing of the target RNA. Both the direct binding of splice acceptor and/or donor sites as well as splice effector domains can be used to manipulate splicing. For example, by using a dCas13d protein with a mutated HEPN domain (e.g., SEQ ID NO: 2 or 4), a guide RNA containing at least one a spacer sequence specific for the target RNA, and optionally an effector domain that affects splicing (such as the RS-rich domain of SRSF1, the Gly-rich domain of hnRNPA1, the alanine-rich motif of RBM4, or the proline-rich motif of DAZAP1), alternative splicing of the RNA can be achieved.

[0554] In some examples, such a method is used for exon inclusion, for example to include exon 2 of acid alpha-glucosidase (GAA) to treat Pompe disease or to include exon 7 of SMN2 to treat spinal muscular atrophy (SMA). In some examples, such a method is used for exon exclusion, for example to restore the reading frame of dystrophin to treat Duchenne muscular dystrophy, to shift the splicing of the Bcl-x pre-mRNA from the antiapoptotic long isoform to the proapoptotic short isoform to treat cancer, to shift the splicing of the MAPT transcript to affect ratios of 3R and 4R tau, or to manipulate the splicing of the lamin A transcript in the case of Hutchinson-Gilford progeria syndrome or other genetic diseases of aging.

[0555] In some examples, the method uses an Cas13d protein, optionally with a mutated HEPN domain, to mask splice acceptor or donor sites, for example to create neoantigens to make cold tumors hot. By affecting the splicing of certain target pre-mRNAs, this method can generate novel exon-exon junctions that can lead to the creation of neo-epitopes in cancer cells. This can make a cancer cell vulnerable to the immune system due to the display of unnatural antigens. In other examples, this method can be used to dynamically manipulate isoform ratios or to restore reading frame of a protein (e.g., dystrophin for Duchenne's muscular dystrophy).

### Example 14

### AAV Delivery of Cas13d

[0556] As described in the examples above, Cas13d can be effectively packaged into AAV to mediate expression in cell types that are not amenable to plasmid delivery or for in vivo delivery of Cas13d. AAV delivery of nuclease active Cas13d can be used to mediate RNA target knock-down in the cell type of interest. Due to its small size compared to other single-effector CRISPR nucleases, Cas13d can be packaged together with a guide RNA or an array containing multiple guide RNAs in a single AAV vector.

### Example 15

### Nucleic Acid-Based Diagnostics with Cas13d

[0557] Cas13d enzymes can be exploited for nucleic acid-based diagnostics within the context of a cell, using cell-free lysate derived from a cell, or a cell-free system containing an engineered Cas13d enzyme and guide RNA to facilitate formation of a ribonucleoprotein complex. Said guide RNA can be provided in the form of a pre-guide RNA, a mature guide RNA, or an array containing one or more spacer sequences. The components can also be provided in the form of a DNA or RNA precursor encoding for the Cas13d enzyme and appropriate guide RNA design via an in vitro transcription/translation system to facilitate the generation of the necessary components. These components of the diagnostic kit comprise the “sensor” module.

[0558] Such a method can be used to determine if a target RNA is present in a test sample. Such a method can also be used to detect a pathogen, such as a virus or bacteria, or diagnose a disease state, such as a cancer (e.g., wherein the target RNA is specific for a particular microbe or disease). Such a method can also be used to test the purity or identity of an environmental sample or agricultural sample, such as seed or soil.

[0559] The “sensor” module will then be challenged with a test sample in the form of RNA. Said test sample can be, but is not limited to, a genomic DNA sample that is converted into RNA—for example via in vitro transcription—or a direct RNA sample. These samples can be extracted from biological material such as patient samples (e.g., cells, tissue, blood, plasma, serum, saliva, urine, tumor biopsy, cell free DNA or RNA, exosomes, carrier vesicles or particles) and environmental samples (e.g., soil, water, air, seed, or plant samples). In one embodiment to improve diagnostic sensitivity, nucleic acid molecules in the sample are amplified using amplification techniques, such as polymerase chain reaction, recombinase polymerase amplification, loop mediated isothermal amplification, nucleic acid sequence based amplification, strand displacement amplification, rolling circle amplification, ligase chain reaction, and others (e.g., those that use isothermal amplification). Said amplification techniques can optionally employ nucleic acid conversion techniques such as transcription or reverse transcription with randomized primers or targeted primers.

[0560] If the sensor module recognizes a cognate target in the test sample, it will activate an RNase activity. This RNase activity can be detected by using a detectable label. In one example, the detectable label includes an RNA linked to a fluorophore and quencher. The intact detectable RNA links the fluorophore and quencher, suppressing fluorescence. Upon cleavage by Cas13d of the detectable RNA, the fluorophore is released from the quencher and displays detectable fluorescent activity.

[0561] In another example, cleavage of the reporter RNA releases a non-fluorescent molecule, which can be converted into a visible signal (e.g., visible by eye). In one example, cleavage of the reporter RNA releases a molecule that can be detected via lateral flow. A molecule that can be detected by lateral flow is any molecule that can be bound specifically by antibodies. In one example, the Cas13d protein along with the guide RNA detecting the target and the reporter RNA conjugated to the reporter molecule can be delivered as a single system in the form of a dry test strip. Upon incubation with the test sample, Cas1Cas13d protein a3d, guide RNA and the reporter RNA are rehydrated and in the presence of the RNA target. The Cas13d protein will cleave the reporter RNA, resulting in the migration of the reporter molecule in the test strip via lateral flow and a resulting positive test line signal by binding to antibodies localized there. Such a shelf stable dry detection system not requiring special (frozen) storage could for example prove advantageous in situations where detection of a target RNA or DNA is performed outside a centralized laboratory facility such as a doctor's office, a hospital, a pharmacy, during field work, in an agricultural setting and so forth.

[0562] Cas13d is active over a broad range of temperatures making such an application outside of a controlled laboratory environment feasible.

### Example 16

### Cas13d as a Diagnostic for RNA or DNA Transcribed into RNA In Vitro

[0563] Cas13d is capable of converting the presence of a matched target RNA into a visible signal in a minimal diagnostic in vitro system. FIGS. 15A-15D (A) Cas13d is converted into an active RNase complex upon binding a target matching the spacer sequence of the guide RNA. It is capable of cleaving gRNA-complementary target RNA or non-complementary bystander RNAs. (B) Cas13d target-dependent RNase activity can be converted into a detectable signal, for example through cleavage of a labeled detector RNA that is cleaved only in the presence of a target matching the spacer of the Cas13d guide RNA. In this example, the detector RNA contains a fluorophore, ‘F’, and a quencher ‘Q’, that abolishes fluorescence. Only upon bystander RNA cleavage is the fluorophore liberated from the quencher and fluorescence is generated. (C) Cas13d from E. siraeum produces a visible signal only in the presence of a perfectly matched target and not in the presence of different mismatched targets. (D) Cas13d from R. flavefaciens strain XPD3002 produces a visible signal only in the presence of a perfectly matched target and not in the presence of different mismatched targets.

[0564] Thus, the system disclosed herein can be part of a lateral flow device (or other solid support), that can be used in diagnostics. The presence of an RNA or DNA sequence can be converted into a signal than can then be detected by conventional lateral flow.

### Example 17

### Cas13d Modifications

[0565] FIGS. 16A-16B, Cas13d is amenable to modifications including truncations of regions with low conservation among orthologs. The alignment of Cas13d orthologs in FIG. 16A shows regions with high (green bars) and low (red bars) conservation.

### Example 18

### Targeting Transcripts In Vivo

[0566] The ccdB gene in bacterial cells was targeted in vivo using different nCas1 orthologues, Eubacterium siraeum nCas1 (Es_nCas1; SEQ ID NO: 1); Eubacterium siraeum nCas1 with mutated HEPN domains (Es_nCas1 HEPN −/−; SEQ ID NO: 2); uncultured Ruminococcus sp. nCas1 (uncul_nCas1; SEQ ID NO: 3) and uncultured Ruminococcus sp. nCas1 with mutated HEPN domains (uncul_nCas1 HEPN −/−; SEQ ID NO: 4) (FIG. 17A). Chemically competent E. coli (strain BW25141-DE3) cells were transformed with (1) an arabinose-inducible ccdB plasmid, and (2) a second plasmid (targeting vector) carrying a compatible origin of replication, nCas1 protein coding sequence, and nCas1 guide array containing 4 spacer sequences targeting the ccdB transcript (FIG. 17A).

1. artificial Eubacterium siraeum nCas1 array targeting ccdB
a.
(SEQ ID NO: 261)
GAACUACACCCGUGCAAAAAUGCAGGGGUCUAAAACUAACGGC
UCUCUCUUUUAUAGGUGUAAACCGAACUACACCCGUGCAAAAAU
GCAGGGGUCUAAAACCUUUAUCUGACAGCAGACGUGCACUGGCC
AGAACUACACCCGUGCAAAAAUGCAGGGGUCUAAAACCAUCAU
GCGCCAGCUUUCAUCCCCGAUAUGGAACUACACCCGUGCAAAAA
UGCAGGGGUCUAAAACUAAUGGCGUUUUUGAUGUCAUUUUCGCG
GUCCGCUGA
i. Full 36 nt direct repeat:
(SEQ ID NO: 262)
GAACUACACCCGUGCAAAAAUGCAGGGGUCUAAAAC
ii. Spacer 1:
(SEQ ID NO: 263)
UAACGGCUCUCUCUUUUAUAGGUGUAAACC
iii. Spacer 2:
(SEQ ID NO: 264)
CUUUAUCUGACAGCAGACGUGCACUGGCCA
iv. Spacer 3:
(SEQ ID NO: 265)
CAUCAUGCGCCAGCUUUCAUCCCCGAUAUG
v. Spacer 4:
(SEQ ID NO: 266)
UAAUGGCGUUUUUGAUGUCAUUUUCGCGGUCCGCUGA
2. artificial uncultured Ruminoccus sp. nCas1 array targeting ccdB
a.
(SEQ ID NO: 267)
CUACUACACUGGUGCAAAUUUGCACUAGUCUAAAACUAACGGCU
CUCUCUUUUAUAGGUGUAAACCCUACUACACUGGUGCAAAUUUG
CACUAGUCUAAAACCUUUAUCUGACAGCAGACGUGCACUGGCCAC
UACUACACUGGUGCAAAUUUGCACUAGUCUAAAACCAUCAUGCG
CCAGCUUUCAUCCCCGAUAUGCUACUACACUGGUGCAAAUUUGC
ACUAGUCUAAAACUAAUGGCGUUUUUGAUGUCAUUUUCGCGGUC
CGC
i. Full 36 nt direct repeat:
(SEQ ID NO: 268)
CUACUACACUGGUGCAAAUUUGCACUAGUCUAAAAC
ii. Spacer 1:
(SEQ ID NO: 269)
UAACGGCUCUCUCUUUUAUAGGUGUAAACC
iii. Spacer 2:
(SEQ ID NO: 270)
CUUUAUCUGACAGCAGACGUGCACUGGCCA
iv. Spacer 3:
(SEQ ID NO: 271)
CAUCAUGCGCCAGCUUUCAUCCCCGAUAUG
v. Spacer 4:
(SEQ ID NO: 272)
UAAUGGCGUUUUUGAUGUCAUUUUCGCGGUCCGCUGA
3. Target RNA (ccdB sequence)
a.
(SEQ ID NO: 273)
AUGCAGUUUAAGGUUUACACCUAUAAAAGAGAGAGCCGUUAUCG
UCUGUUUGUGGAUGUACAGAGUGAUAUUAUUGACACGCCCGGGCG
ACGGAUGGUGAUCCCCCUGGCCAGUGCACGUCUGCUGUCAGAUA
AAGUCUCCCGUGAACUUUACCCGGUGGUGCAUAUCGGGGAUGAA
AGCUGGCGCAUGAUGACCACCGAUAUGGCCAGUGUGCCGGUCUC
CGUUAUCGGGGAAGAAGUGGCUGAUCUCAGCCACCGCGAAAAUG
ACAUCAAAAACGCCAUUAACCUGAUGUUUUGGGGAAUA
i. spacer 1 target:
(SEQ ID NO: 274)
GGUUUACACCUAUAAAAGAGAGAGCCGUUA
ii. spacer 2 target:
(SEQ ID NO: 275)
UGGCCAGUGCACGUCUGCUGUCAGAUAAAG
iii. spacer 3 target:
(SEQ ID NO: 276)
CAUAUCGGGGAUGAAAGCUGGCGCAUGAUG
iv. spacer 4 target:
(SEQ ID NO: 277)
ACCGCGAAAAUGACAUCAAAAACGCCAUUA
v. dCas9 target (underlined):
(SEQ ID NO: 259)
UUAUCGUCUGUUUGUGGAUG

The transformed bacteria were plated on 2 mM arabinose plates to induce ccdB expression and harvested after 24 hours. Total RNA was extracted with Trizol followed by random hexamer-mediated reverse transcription and Taqman probe-based qPCR.

[0567] Mutation of the two HEPN domains in each nCas1 protein demonstrate no targeting of ccdB (FIG. 17B, HEPN −/−), while active wild-type nCas1 proteins knock downed the expression of ccdB (FIG. 17B, Es_nCas1; uncul_nCas1). Because dCas9-(catalytically inactive, or “dead” Cas9)-mediated transcriptional repression through binding of the DNA sequence downstream of the transcriptional start site is a current standard in the field, we validate the assay by targeting dCas9 to the ccdB promoter to repress transcription of the ccdB gene. Taken together, this data demonstrates guide RNA-specific degradation of target transcripts in vivo within prokaryotic cells in a HEPN domain-dependent manner.

### REFERENCES

[0568] Abudayyeh, O. O., Gootenberg, J. S., Essletzbichler, P., Han, S., Joung, J., Belanto, J. J., Verdine, V., Cox, D. B. T., Kellner, M. J., Regev, A., et al. (2017). RNA targeting with CRISPR-Cas13. Nature.
[0569] Abudayyeh, O. O., Gootenberg, J. S., Konermann, S., Joung, J., Slaymaker, I. M., Cox, D. B., Shmakov, S., Makarova, K. S., Semenova, E., Minakhin, L., et al. (2016). C2c2 is a single-component programmable RNA-guided RNA-targeting CRISPR effector. Science 353, aaf5573.
[0570] Almeida, S., Zhang, Z., Coppola, G., Mao, W., Futai, K., Karydas, A., Geschwind, M. D., Tartaglia, M. C., Gao, F., Gianni, D., et al. (2012). Induced pluripotent stem cell models of progranulin-deficient frontotemporal dementia uncover specific reversible neuronal defects. Cell Rep 2, 789-798.
[0571] Anantharaman, V., Makarova, K. S., Burroughs, A. M., Koonin, E. V., and Aravind, L. (2013). Comprehensive analysis of the HEPN superfamily: identification of novel roles in intra-genomic conflicts, defense, pathogenesis and RNA processing. Biol Direct 8, 15.
[0572] Batra, R., Nelles, D. A., Pirie, E., Blue, S. M., Marina, R. J., Wang, H., Chaim, I. A., Thomas, J. D., Zhang, N., Nguyen, V., et al. (2017). Elimination of Toxic Microsatellite Repeat Expansion RNA by RNA-Targeting Cas9. Cell 170, 899-912 e810.
[0573] Birmingham, A., Anderson, E. M., Reynolds, A., Ilsley-Tyree, D., Leake, D., Fedorov, Y., Baskerville, S., Maksimova, E., Robinson, K., Karpilow, J., et al. (2006). 3′ UTR seed matches, but not overall identity, are associated with RNAi off-targets. Nat Methods 3, 199-204.
[0574] Biswas, M. H. U., Almeida, S., Lopez-Gonzalez, R., Mao, W., Zhang, Z., Karydas, A., Geschwind, M. D., Biernat, J., Mandelkow, E. M., Futai, K., et al. (2016). MMP-9 and MMP-2 Contribute to Neuronal Cell Death in iPSC Models of Frontotemporal Dementia with MAPT Mutations. Stem Cell Reports 7, 316-324.
[0575] Bland, C., Ramsey, T. L., Sabree, F., Lowe, M., Brown, K., Kyrpides, N.C., and Hugenholtz, P. (2007). CRISPR recognition tool (CRT): a tool for automatic detection of clustered regularly interspaced palindromic repeats. BMC Bioinformatics 8, 209.
[0576] Boeve, B. F., and Hutton, M. (2008). Refining frontotemporal dementia with parkinsonism linked to chromosome 17: introducing FTDP-17 (MAPT) and FTDP-17 (PGRN). Arch Neurol 65, 460-464.
[0577] Cheong, C. G., and Hall, T. M. (2006). Engineering RNA sequence specificity of Pumilio repeats. Proc Natl Acad Sci USA 103, 13635-13639.
[0578] Chiriboga, C. A., Swoboda, K. J., Darras, B. T., lannaccone, S. T., Montes, J., De Vivo, D. C., Norris, D. A., Bennett, C. F., and Bishop, K. M. (2016). Results from a phase 1 study of nusinersen (ISIS-SMN(Rx)) in children with spinal muscular atrophy. Neurology 86, 890-897.
[0579] Chylinski, K., Le Rhun, A., and Charpentier, E. (2013). The tracrRNA and Cas9 families of type II CRISPR-Cas immunity systems. RNA Biol 10, 726-737.
[0580] Cox, D. B. T., Gootenberg, J. S., Abudayyeh, O. O., Franklin, B., Kellner, M. J., Joung, J., and Zhang, F. (2017). RNA editing with CRISPR-Cas13. Science 358, 1019-1027.
[0581] Deltcheva, E., Chylinski, K., Sharma, C. M., Gonzales, K., Chao, Y., Pirzada, Z. A., Eckert, M. R., Vogel, J., and Charpentier, E. (2011). CRISPR RNA maturation by trans-encoded small RNA and host factor RNase III. Nature 471, 602-607.
[0582] Dobin, A., Davis, C. A., Schlesinger, F., Drenkow, J., Zaleski, C., Jha, S., Batut, P., Chaisson, M., and Gingeras, T. R. (2013). STAR: ultrafast universal RNA-seq aligner. Bioinformatics 29, 15-21.
[0583] Doench, J. G., Petersen, C. P., and Sharp, P. A. (2003). siRNAs can function as miRNAs. Genes Dev 17, 438-442.
[0584] Doudna, J. A., and Charpentier, E. (2014). Genome editing. The new frontier of genome engineering with CRISPR-Cas9. Science 346, 1258096.
[0585] Du, Y. C., Gu, S., Zhou, J., Wang, T., Cai, H., Macinnes, M. A., Bradbury, E. M., and Chen, X. (2006). The dynamic alterations of H2AX complex during DNA repair detected by a proteomic approach reveal the critical roles of Ca(2+)/calmodulin in the ionizing radiation-induced cell cycle arrest. Mol Cell Proteomics 5, 1033-1044.
[0586] East-Seletsky, A., O'Connell, M. R., Burstein, D., Knott, G. J., and Doudna, J. A. (2017). RNA Targeting by Functionally Orthogonal Type VI-A CRISPR-Cas Enzymes. Mol Cell 66, 373-383 e373.
[0587] East-Seletsky, A., O'Connell, M. R., Knight, S. C., Burstein, D., Cate, J. H., Tjian, R., and Doudna, J. A. (2016). Two distinct RNase activities of CRISPR-C2c2 enable guide-RNA processing and RNA detection. Nature 538, 270-273.
[0588] Edgar, R. C. (2007). PILER-CR: fast and accurate identification of CRISPR repeats. BMC Bioinformatics 8, 18.
[0589] Fonfara, I., Richter, H., Bratovic, M., Le Rhun, A., and Charpentier, E. (2016). The CRISPR-associated DNA-cleaving enzyme Cpf1 also processes precursor CRISPR RNA. Nature 532, 517-521.
[0590] Gasiunas, G., Barrangou, R., Horvath, P., and Siksnys, V. (2012). Cas9-crRNA ribonucleoprotein complex mediates specific DNA cleavage for adaptive immunity in bacteria. Proc Natl Acad Sci USA 109, E2579-2586.
[0591] Gilbert, L. A., Horlbeck, M. A., Adamson, B., Villalta, J. E., Chen, Y., Whitehead, E. H., Guimaraes, C., Panning, B., Ploegh, H. L., Bassik, M. C., et al. (2014). Genome-Scale CRISPR-Mediated Control of Gene Repression and Activation. Cell 159, 647-661.
[0592] Gilbert, L. A., Larson, M. H., Morsut, L., Liu, Z., Brar, G. A., Torres, S. E., Stern-Ginossar, N., Brandman, O., Whitehead, E. H., Doudna, J. A., et al. (2013). CRISPR-mediated modular RNA-guided regulation of transcription in eukaryotes. Cell 154, 442-451.
[0593] Grissa, I., Vergnaud, G., and Pourcel, C. (2007). CRISPRFinder: a web tool to identify clustered regularly interspaced short palindromic repeats. Nucleic Acids Res 35, W52-57.
[0594] Hammond, S. M., and Wood, M. J. (2011). Genetic therapies for RNA mis-splicing diseases. Trends Genet 27, 196-205.
[0595] Heidrich, N., Dugar, G., Vogel, J., and Sharma, C. M. (2015). Investigating CRISPR RNA Biogenesis and Function Using RNA-seq. Methods Mol Biol 1311, 1-21.
[0596] Heinz, S., Benner, C., Spann, N., Bertolino, E., Lin, Y. C., Laslo, P., Cheng, J. X., Murre, C., Singh, H., and Glass, C. K. (2010). Simple combinations of lineage-determining transcription factors prime cis-regulatory elements required for macrophage and B cell identities. Mol Cell 38, 576-589.
[0597] Hsu, P. D., Lander, E. S., and Zhang, F. (2014). Development and applications of CRISPR-Cas9 for genome engineering. Cell 157, 1262-1278.
[0598] Jackson, A. L., Bartz, S. R., Schelter, J., Kobayashi, S. V., Burchard, J., Mao, M., Li, B., Cavet, G., and Linsley, P. S. (2003). Expression profiling reveals off-target gene regulation by RNAi. Nat Biotechnol 21, 635-637.
[0599] Jinek, M., Chylinski, K., Fonfara, I., Hauer, M., Doudna, J. A., and Charpentier, E. (2012). A programmable dual-RNA-guided DNA endonuclease in adaptive bacterial immunity. Science 337, 816-821.
[0600] Kar, A., Kuo, D., He, R., Zhou, J., and Wu, J. Y. (2005). Tau alternative splicing and frontotemporal dementia. Alzheimer Dis Assoc Disord 19 Suppl 1, S29-36.
[0601] Kim, E., Koo, T., Park, S. W., Kim, D., Kim, K., Cho, H. Y., Song, D. W., Lee, K. J., Jung, M. H., Kim, S., et al. (2017). In vivo genome editing with a small Cas9 orthologue derived from Campylobacter jejuni. Nat Commun 8, 14500.
[0602] Liu, L., Li, X., Wang, J., Wang, M., Chen, P., Yin, M., Li, J., Sheng, G., and Wang, Y. (2017). Two Distant Catalytic Sites Are Responsible for C2c2 RNase Activities. Cell 168, 121-134 e112.
[0603] Love, M. I., Huber, W., and Anders, S. (2014). Moderated estimation of fold change and dispersion for RNA-seq data with DESeq2. Genome Biol 15, 550.
[0604] Makarova, K. S., Wolf, Y. I., Alkhnbashi, O. S., Costa, F., Shah, S. A., Saunders, S. J., Barrangou, R., Brouns, S. J., Charpentier, E., Haft, D. H., et al. (2015). An updated evolutionary classification of CRISPR-Cas systems. Nat Rev Microbiol 13, 722-736.
[0605] Matera, A. G., and Wang, Z. (2014). A day in the life of the spliceosome. Nat Rev Mol Cell Biol 15, 108-121.
[0606] Naldini, L. (2015). Gene therapy returns to centre stage. Nature 526, 351-360.
[0607] O'Connell, M. R., Oakes, B. L., Sternberg, S. H., East-Seletsky, A., Kaplan, M., and Doudna, J. A. (2014). Programmable RNA recognition and cleavage by CRISPR/Cas9. Nature 516, 263-266.
[0608] Orengo, J. P., Bundman, D., and Cooper, T. A. (2006). A bichromatic fluorescent reporter for cell-based screens of alternative splicing. Nucleic Acids Res 34, e148.
[0609] Peabody, D. S. (1993). The RNA binding site of bacteriophage MS2 coat protein. EMBO J 12, 595-600.
[0610] Ran, F. A., Cong, L., Yan, W. X., Scott, D. A., Gootenberg, J. S., Kriz, A. J., Zetsche, B., Shalem, O., Wu, X., Makarova, K. S., et al. (2015). In vivo genome editing using Staphylococcus aureus Cas9. Nature 520, 186-191.
[0611] Samai, P., Pyenson, N., Jiang, W., Goldberg, G. W., Hatoum-Aslan, A., and Marraffini, L. A. (2015). Co-transcriptional DNA and RNA Cleavage during Type III CRISPR-Cas Immunity. Cell 161, 1164-1174.
[0612] Schena, M., Shalon, D., Davis, R. W., and Brown, P. O. (1995). Quantitative monitoring of gene expression patterns with a complementary DNA microarray. Science 270, 467-470.
[0613] Schoch, K. M., DeVos, S. L., Miller, R. L., Chun, S. J., Norrbom, M., Wozniak, D. F., Dawson, H. N., Bennett, C. F., Rigo, F., and Miller, T. M. (2016). Increased 4R-Tau Induces Pathological Changes in a Human-Tau Mouse Model. Neuron 90, 941-947.
[0614] Shendure, J., Balasubramanian, S., Church, G. M., Gilbert, W., Rogers, J., Schloss, J. A., and Waterston, R. H. (2017). DNA sequencing at 40: past, present and future. Nature advance online publication.
[0615] Shmakov, S., Abudayyeh, O. O., Makarova, K. S., Wolf, Y. I., Gootenberg, J. S., Semenova, E., Minakhin, L., Joung, J., Konermann, S., Severinov, K., et al. (2015). Discovery and Functional Characterization of Diverse Class 2 CRISPR-Cas Systems. Mol Cell 60, 385-397.
[0616] Sigoillot, F. D., Lyman, S., Huckins, J. F., Adamson, B., Chung, E., Quattrochi, B., and King, R. W. (2012). A bioinformatics method identifies prominent off-targeted transcripts in RNAi screens. Nat Methods 9, 363-366.
[0617] Smargon, A. A., Cox, D. B., Pyzocha, N. K., Zheng, K., Slaymaker, I. M., Gootenberg, J. S., Abudayyeh, O. A., Essletzbichler, P., Shmakov, S., Makarova, K. S., et al. (2017). Cas13b Is a Type VI-B CRISPR-Associated RNA-Guided RNase Differentially Regulated by Accessory Proteins Csx27 and Csx28. Mol Cell 65, 618-630 e617.
[0618] Smith, I., Greenside, P. G., Natoli, T., Lahr, D. L., Wadden, D., Tirosh, I., Narayan, R., Root, D. E., Golub, T. R., Subramanian, A., et al. (2017). Evaluation of RNAi and CRISPR technologies by large-scale gene expression profiling in the Connectivity Map. PLoS Biol 15, e2003213.
[0619] Swiech, L., Heidenreich, M., Banerjee, A., Habib, N., Li, Y., Trombetta, J., Sur, M., and Zhang, F. (2015). In vivo interrogation of gene function in the mammalian brain using CRISPR-Cas9. Nat Biotechnol 33, 102-106.
[0620] Treu, L., Kougias, P. G., Campanaro, S., Bassani, I., and Angelidaki, I. (2016). Deeper insight into the structure of the anaerobic digestion microbial community; the biogas microbiome database is expanded with 157 new genomes. Bioresour Technol 216, 260-266.
[0621] van der Oost, J., Westra, E. R., Jackson, R. N., and Wiedenheft, B. (2014). Unravelling the structural and mechanistic basis of CRISPR-Cas systems. Nat Rev Microbiol 12, 479-492.
[0622] Wang, Y., Liu, J., Huang, B. O., Xu, Y. M., Li, J., Huang, L. F., Lin, J., Zhang, J., Min, Q. H., Yang, W. M., et al. (2015). Mechanism of alternative splicing and its regulation. Biomed Rep 3, 152-158.
[0623] Wright, A. V., and Doudna, J. A. (2016). Protecting genome integrity during CRISPR immune adaptation. Nat Struct Mol Biol 23, 876-883.
[0624] Yang, X., Zou, P., Yao, J., Yun, D., Bao, H., Du, R., Long, J., and Chen, X. (2010). Proteomic dissection of cell type-specific H2AX-interacting protein complex associated with hepatocellular carcinoma. J Proteome Res 9, 1402-1415.
[0625] Yosef, I., Goren, M. G., and Qimron, U. (2012). Proteins and DNA elements essential for the CRISPR adaptation process in Escherichia coli. Nucleic Acids Res 40, 5569-5576.
[0626] Zalatan, J. G., Lee, M. E., Almeida, R., Gilbert, L. A., Whitehead, E. H., La Russa, M., Tsai, J. C., Weissman, J. S., Dueber, J. E., Qi, L. S., et al. (2015). Engineering complex synthetic transcriptional programs with CRISPR RNA scaffolds. Cell 160, 339-350.
[0627] Zetsche, B., Gootenberg, J. S., Abudayyeh, O. O., Slaymaker, I. M., Makarova, K. S., Essletzbichler, P., Volz, S. E., Joung, J., van der Oost, J., Regev, A., et al. (2015). Cpf1 is a single RNA-guided endonuclease of a class 2 CRISPR-Cas system. Cell 163, 759-771.
[0628] Zetsche, B., Strecker, J., Abudayyeh, O. O., Gootenberg, J. S., Scott, D. A., and Zhang, F. (2017). A Survey of Genome Editing Activity for 16 Cpf1 orthologs. bioRxiv.
[0629] Zhang, J., Graham, S., Tello, A., Liu, H., and White, M. F. (2016). Multiple nucleic acid cleavage modes in divergent type III CRISPR systems. Nucleic Acids Res 44, 1789-1799.
[0630] Zhang, Y., Pak, C., Han, Y., Ahlenius, H., Zhang, Z., Chanda, S., Marro, S., Patzke, C., Acuna, C., Covy, J., et al. (2013). Rapid single-step induction of functional neurons from human pluripotent stem cells. Neuron 78, 785-798.

[0631] In view of the many possible embodiments to which the principles of the disclosure may be applied, it should be recognized that the illustrated embodiments are only examples of the invention and should not be taken as limiting the scope of the invention. Rather, the scope of the invention is defined by the following claims. We therefore claim as our invention all that comes within the scope and spirit of these claims.

The application's sequence listing, which the Patent Office published only in electronic form, follows.

SEQUENCE LISTING (277 sequences)

SEQ ID NO: 1 - protein, 954 aa, Artificial Sequence
  Eubacterium siraeum nCas1
MGKKIHARDLREQRKTDRTEKFADQNKKREAERAVPKKDAAVSVKSVSSVSSKKDNVTKSMAKAAGVKSVFAVGNTVYMTSFGRGNDAVLEQKIVDTSHEPLNIDDPAYQLNVVTMNGYSVTGHRGETVSAVTDNPLRRFNGRKKDEPEQSVPTDMLCLKPTLEKKFFGKEFDDNIHIQLIYNILDIEKILAVYSTNAIYALNNMSADENIENSDFFMKRTTDETFDDFEKKKESTNSREKADFDAFEKFIGNYRLAYFADAFYVNKKNPKGKAKNVLREDKELYSVLTLIGKLRHWCVHSEEGRAEFWLYKLDELKDDFKNVLDVVYNRPVEEINNRFIENNKVNIQILGSVYKNTDIAELVRSYYEFLITKKYKNMGFSIKKLRESMLEGKGYADKEYDSVRNKLYQMTDFILYTGYINEDSDRADDLVNTLRSSLKEDDKTTVYCKEADYLWKKYRESIREVADALDGDNIKKLSKSNIEIQEDKLRKCFISYADSVSEFTKLIYLLTRFLSGKEINDLVTTLINKFDNIRSFLEIMDELGLDRTFTAEYSFFEGSTKYLAELVELNSFVKSCSFDINAKRTMYRDALDILGIESDKTEEDIEKMIDNILQIDANGDKKLKKNNGLRNFIASNVIDSNRFKYLVRYGNPKKIRETAKCKPAVRFVLNEIPDAQIERYYEACCPKNTALCSANKRREKLADMIAEIKFENFSDAGNYQKANVTSRTSEAEIKRKNQAIIRLYLTVMYIMLKNLVNVNARYVIAFHCVERDTKLYAESGLEVGNIEKNKTNLTMAVMGVKLENGIIKTEFDKSFAENAANRYLRNARWYKLILDNLKKSERAVVNEFRNTVCHLNAIRNININIKEIKEVENYFALYHYLIQKHLENRFADKKVERDTGDFISKLEEHKTYCKDFVKAYCTPFGYNLVRYKNLTIDGLFDKNYPGKDDSDEQK

SEQ ID NO: 2 - protein, 954 aa, Artificial Sequence
  Eubacterium siraeum nCas1 HEPN-/-
MGKKIHARDLREQRKTDRTEKFADQNKKREAERAVPKKDAAVSVKSVSSVSSKKDNVTKSMAKAAGVKSVFAVGNTVYMTSFGRGNDAVLEQKIVDTSHEPLNIDDPAYQLNVVTMNGYSVTGHRGETVSAVTDNPLRRFNGRKKDEPEQSVPTDMLCLKPTLEKKFFGKEFDDNIHIQLIYNILDIEKILAVYSTNAIYALNNMSADENIENSDFFMKRTTDETFDDFEKKKESTNSREKADFDAFEKFIGNYRLAYFADAFYVNKKNPKGKAKNVLREDKELYSVLTLIGKLAHWCVASEEGRAEFWLYKLDELKDDFKNVLDVVYNRPVEEINNRFIENNKVNIQILGSVYKNTDIAELVRSYYEFLITKKYKNMGFSIKKLRESMLEGKGYADKEYDSVRNKLYQMTDFILYTGYINEDSDRADDLVNTLRSSLKEDDKTTVYCKEADYLWKKYRESIREVADALDGDNIKKLSKSNIEIQEDKLRKCFISYADSVSEFTKLIYLLTRFLSGKEINDLVTTLINKFDNIRSFLEIMDELGLDRTFTAEYSFFEGSTKYLAELVELNSFVKSCSFDINAKRTMYRDALDILGIESDKTEEDIEKMIDNILQIDANGDKKLKKNNGLRNFIASNVIDSNRFKYLVRYGNPKKIRETAKCKPAVRFVLNEIPDAQIERYYEACCPKNTALCSANKRREKLADMIAEIKFENFSDAGNYQKANVTSRTSEAEIKRKNQAIIRLYLTVMYIMLKNLVNVNARYVIAFHCVERDTKLYAESGLEVGNIEKNKTNLTMAVMGVKLENGIIKTEFDKSFAENAANRYLRNARWYKLILDNLKKSERAVVNEFANTVCALNAIRNININIKEIKEVENYFALYHYLIQKHLENRFADKKVERDTGDFISKLEEHKTYCKDFVKAYCTPFGYNLVRYKNLTIDGLFDKNYPGKDDSDEQK

SEQ ID NO: 3 - protein, 919 aa, Artificial Sequence
  Uncultured Ruminococcus sp. nCas1
MAKKNKMKPRELREAQKKARQLKAAEINNNAAPAIAAMPAAEVIAPAAEKKKSSVKAAGMKSILVSENKMYITSFGKGNSAVLEYEVDNNDYNQTQLSSKDNSNIQLGGVNEVNITFSSKHGFESGVEINTSNPTHRSGESSPVRGDMLGLKSELEKRFFGKTFDDNIHIQLIYNILDIEKILAVYVTNIVYALNNMLGVKGSESHDDFIGYLSTNNIYDVFIDPDNSSLSDDKKANVRKSLSKFNALLKTKRLGYFGLEEPKTKDNRVSQAYKKRVYHMLAIVGQIRQCVFHDKSGAKRFDLYSFINNIDPEYRDTLDYLVEERLKSINKDFIEDNKVNISLLIDMMKGYEADDIIRLYYDFIVLKSQKNLGFSIKKLREKMLDEYGFRFKDKQYDSVRSKMYKLMDFLLFCNYYRNDIAAGESLVRKLRFSMTDDEKEGIYADEAAKLWGKFRNDFENIADHMNGDVIKELGKADMDFDEKILDSEKKNASDLLYFSKMIYMLTYFLDGKEINDLLTTLISKFDNIKEFLKIMKSSAVDVECELTAGYKLFNDSQRITNELFIVKNIASMRKPAASAKLTMFRDALTILGIDDKITDDRISGILKLKEKGKGIHGLRNFITNNVIESSRFVYLIKYANAQKIREVAKNEKVVMFVLGGIPDTQIERYYKSCVEFPDMNSSLGVKRSELARMIKNISFDDFKNVKQQAKGRENVAKERAKAVIGLYLTVMYLLVKNLVNVNARYVIAIHCLERDFGLYKEIIPELASKNLKNDYRILSQTLCELCDKSPNLFLKKNERLRKCVEVDINNADSSMTRKYRNCIAHLTVVRELKEYIGDICTVDSYFSIYHYVMQRCITKRENDTKQEEKIKYEDDLLKNHGYTKDFVKALNSPFGYNIPRFKNLSIEQLFDRNEYLTEK

SEQ ID NO: 4 - protein, 919 aa, Artificial Sequence
  Uncultured Ruminococcus sp. nCas1 HEPN-/-
MAKKNKMKPRELREAQKKARQLKAAEINNNAAPAIAAMPAAEVIAPAAEKKKSSVKAAGMKSILVSENKMYITSFGKGNSAVLEYEVDNNDYNQTQLSSKDNSNIQLGGVNEVNITFSSKHGFESGVEINTSNPTHRSGESSPVRGDMLGLKSELEKRFFGKTFDDNIHIQLIYNILDIEKILAVYVTNIVYALNNMLGVKGSESHDDFIGYLSTNNIYDVFIDPDNSSLSDDKKANVRKSLSKFNALLKTKRLGYFGLEEPKTKDNRVSQAYKKRVYHMLAIVGQIAQCVFADKSGAKRFDLYSFINNIDPEYRDTLDYLVEERLKSINKDFIEDNKVNISLLIDMMKGYEADDIIRLYYDFIVLKSQKNLGFSIKKLREKMLDEYGFRFKDKQYDSVRSKMYKLMDFLLFCNYYRNDIAAGESLVRKLRFSMTDDEKEGIYADEAAKLWGKFRNDFENIADHMNGDVIKELGKADMDFDEKILDSEKKNASDLLYFSKMIYMLTYFLDGKEINDLLTTLISKFDNIKEFLKIMKSSAVDVECELTAGYKLFNDSQRITNELFIVKNIASMRKPAASAKLTMFRDALTILGIDDKITDDRISGILKLKEKGKGIHGLRNFITNNVIESSRFVYLIKYANAQKIREVAKNEKVVMFVLGGIPDTQIERYYKSCVEFPDMNSSLGVKRSELARMIKNISFDDFKNVKQQAKGRENVAKERAKAVIGLYLTVMYLLVKNLVNVNARYVIAIHCLERDFGLYKEIIPELASKNLKNDYRILSQTLCELCDKSPNLFLKKNERLRKCVEVDINNADSSMTRKYANCIAALTVVRELKEYIGDICTVDSYFSIYHYVMQRCITKRENDTKQEEKIKYEDDLLKNHGYTKDFVKALNSPFGYNIPRFKNLSIEQLFDRNEYLTEK

SEQ ID NO: 5 - protein, 408 aa, Artificial Sequence
  Gut_metagenome_contig2791000549
MKQNDRENNNKIKKSAAKAVGVKSLARLSDGSTVVSSFGKGAAAELESLITGGEIRKLSDKAILEITDDTQNKNAYNVKSSRIPNLTARTDKLSDKSGMDDLGFKRELELEVFGQCFDDSIHIQIAHAVFDIQKSLAAVIPNVLYTLNNLDRSYSTDNTSDKKDIIGNTLNYQHSYESFNVEKRGEFTEYYNAAKDRFSYFPDILCVLEKVNGKDRYQPKSEKDAFNVLSSVNMLRNSLFHFAPKSNDGKARIAVFKNQFDSDFSHITSTVNKIYSAKIAGVNENFLNNEGNNLYIILKATNWDIKKIVPQLYRFSVLKSDKNMGFNMRKLREFAVESKNIDLSRLNDKFLTNNRKKLYKVIDFIIYYHLNKVLKDSFVDDFVAALRASQSEEEKEKLYAQYSERLFA

SEQ ID NO: 6 - protein, 295 aa, Artificial Sequence
  Gut_metagenome_contig855000317
TDNPLHGAGGIARDHSDLIHARKALEMRYYGQTFEDNIHIQLIYNILDIEKILSVHINNIVYTLNNLLRPLTDNNFDFIGELSTYRDYEKFLEVSEIEYIIDENGEEKQNKEYTKRKLFFRLCYMPQLRYFNIIVEGPHEPVVQVENPELLKKIEASRISDRAKTVTFNEKEFYNVLIALGTLRQMEAHGNPLINIYQFDKKQNVYSTLTKKYKERVITLDNGFLSRAKKNLIILFRAYGIEDAEEKKQYIRNYYDFTVRKNYKNQGFSIKTLREHITTDIEEAIQLRSTAFDSV

SEQ ID NO: 7 - protein, 159 aa, Artificial Sequence
  Gut_metagenome_contig3389000027
PEKAAFTVHNDCEAFFEIDGRVQRAVADNPLHKYEKDDHGQDRISREKLEMRYYGRTFEDNIHIQVIYNILDIEKIMSIHINNIIFTINNLLRREEEDFSDLIGYITLCEKYEDLSKKGREEIRDSFDRLCKAPQLAYYNFQIEKKGKKDPNAIILTEK

SEQ ID NO: 8 - protein, 108 aa, Artificial Sequence
  Gut_metagenome_contig8061000170
EVTGRGQGATADNPLYKYSQKKAWDRQDRISKDKLELRYYGQTFEDNIHIQTIYNILDIEKILSIHINNIVFTINNLLRNDNDEQDDIVGYISLCKKYADLSKEKNAE

SEQ ID NO: 9 - protein, 237 aa, Artificial Sequence
  Gut_metagenome_contig1509000299
MKSTFVLGENNLLMTSFGKGNKAVVEKQIRDQQITDLSDPSAFTVKQDKDLHFNIDGRVRGASTDNPFHHNPEKTAQPPVRDDLIHARSFLEKRYYGENFTDNIHIQCIYSILDVEKILVSHINNIVYMLNNFLREEGETLTDLIGYLSIFKSYEGLMNSTRNDAAEMRRHFFSLCQAKQLGYLNLEVLKPQPDKPKQGKKKPADPNTIKLTEEEFFNVLLALSNMRQMLVHGNAKQ

SEQ ID NO: 10 - protein, 214 aa, Artificial Sequence
  Gut_metagenome_contig9549000591
KAKLEKRYFGQTFEDNIHIQVIYNMLDIEKILTIHVNNIVFTINNFLREEGEDLTDIVGYITKYKSLAKFKENKNAREYYELFCKLCDAKQLGYLNLEYNSVRSKLYKLFDFILVHHYKNDSSPESTALKNLLRTCLTDEEKEKVYVQTAKELTALYSYHFKEASVSVNARNIKEYQEKAQVYHISIADKISSTGIGLFSQLIYMLTLLLDGKE

SEQ ID NO: 11 - protein, 422 aa, Artificial Sequence
  Gut_metagenome_contig71000500
MKKQKSKKTVSKTSGLKEALSVQGTVIMTSFGKGNMANLSYKIPSSQKPQNLNSSAGLKNVEVSGKKIKFQGRHPKIATTDNPLFKPQPGMDLLCLKDKLEMHYFGKTFDDNIHIQLIYQILDIEKILAVHVNNIVFTLDNVLHPQKEELTEDFIGAGGWRINLDYQTLRGQTNKYDRFKNYIKRKELLYFGEAFYHENERRYEEDIFAILTLLSALRQFCFHSDLSSDESDHVNSFWLYQLEDQLSDEFKETLSILWEEVTERIDSEFLKTNTVNLHILCHVFPKESKETIVRAYYEFLIKKSFKNMGFSIKKLREIMLEQSDLKSFKEDKYNSVRAKLYKLFDFIITYYYDHHAFEKEALVSSLRSSLTEENKEEIYIKTARTLASALGADFKKAAADVNAKNIRDYQKKANDYRISFED

SEQ ID NO: 12 - protein, 49 aa, Artificial Sequence
  Artificial sequence
IKIGNTGIGYFSELIYMLTLLLDGKEINDLLTTLINKFDNIISFIDILK

SEQ ID NO: 13 - protein, 148 aa, Artificial Sequence
  Gut_metagenome_contig3915000357
MKDKLEQWYFDKTFDDNIHIQLIYQIQDIEKILASHVNNIVFALDNILHATESETGDFLGMGYMRATNTFEEYRDSAISNVKKSYETFETYIKKKELLYFGEAFYHGNTCRKPEDIYHILAMVSSLRQFCFHSTFDDKSKSIKGSWLY

SEQ ID NO: 14 - protein, 137 aa, Artificial Sequence
  Gut_metagenome_contig4719000173
KNVITSRSFYYLVRYAKPTAVRKLMSNPKIVRYVLKRLPENQVASYYSAIWTQSESNSNETVKLIEMIDRLTTEIAGFSFAVLKDKKDSIVSASRESRAVNLEVERLKKLTTLYMSIAYIAVKSLVKVNARYFIAYS

SEQ ID NO: 15 - protein, 95 aa, Artificial Sequence
  Gut_metagenome_contig6929000468
MKTIKKSSKAYGLKSTFAYNDDVYMTSFGKGNDFVMEKLIYPNDNVEDLSDNPKFDVEVENKDITLKYKKSEINVNNPAKSGIKQDYLMLKDKLE

SEQ ID NO: 16 - protein, 114 aa, Artificial Sequence
  Gut_metagenome_contig7367000486
NRLKTKADLERLFSNRRIGYFGQAFYESDKQQRNEMEIYDNLALIGSLRQWAVHGNKTNDPAWLYKLESLPDEFKSVLDKVYAETVRKVNYKFIKTNAVNLQILQELYPKESFA

SEQ ID NO: 17 - protein, 107 aa, Artificial Sequence
  Gut_metagenome_contig7930000403
YAKIIIGEITSKYNKFDDIINLVYREIRNRNNTINFKNEIKNISTITNYSYFTKFIYFITKFLDGKEINELLTSLINKFDNIQAFNDILLEKLQDKNESKFAIFNGK

SEQ ID NO: 18 - protein, 282 aa, Artificial Sequence
  Gut_metagenome_contig993000527
NIDSLTAVYKGVNNQNRVEFGDKYDMFNKAGEICESLRSINSFARMESPAPAAKRTMFVDAIRMFGFADVSDNDAEKFYKENIEPFIYDRNGDIEDEWKKGKLVHKKDEKKKGVYNFIATNVIESNRFQYLVRYANTEKIAALARNETIVRFVIKKLPAAQIVRYYIACNRIRENINSNVLTSDDMAESLVKLVTGMDFGKIKGVRNDDRSGDKEMKKAIVTLYLTILYHLTKNLVYVNSRYFMAFHCLERDMNLFGEGQKQALRNTGDYPADNADLRRSDI

SEQ ID NO: 19 - protein, 118 aa, Artificial Sequence
  Gut_metagenome_contig6552000639
AVDLNPDDPAFNVNEVTEERFILDHGRIKGCIATADNPLHASSAPQDMLLLKSVLEERFFGMSFPEDNVHIQLIYNILDIEKILTVYSTNAVYAINNLFRADDQEDDEFIGDLSVDTS

SEQ ID NO: 20 - protein, 87 aa, Artificial Sequence
  Gut_metagenome_contig11932000246
RIVNSFAHMKKESMSAKKIMFDEALIVLGIDDAEKERELDQMLDKDARKQNPQRAGLRNFIANNVIESDRFKYLVRYGNVKRIKGIA

SEQ ID NO: 21 - protein, 85 aa, Artificial Sequence
  Gut_metagenome_contig12963000286
EKETELNLMLDKDARKQNRQKAGLRNFIANNVIESERFKYLVRYGNVKRIKGLSTNSQVMGFVLKDIADAQIVRYYRSIYGDDNC

SEQ ID NO: 22 - protein, 155 aa, Artificial Sequence
  Gut_metagenome_contig2952000470
IRLPNGTIMDECDVSKATTVKNRYLHNKKWYSLAFTNYKNSDSDVIVNFRNSVAHLNAIRNIDEYIDGIGEINSHTGYFEIYHYIIQKRMQAVTTDKSKLQPKTEEYFENLSKYHTYCKDFVKAYCVPMAYNLPRYKNLTIDGQFDRNIHTETKE

SEQ ID NO: 23 - protein, 406 aa, Artificial Sequence
  Gut_metagenome_contig451000394
LQELYPKESFASIVKEYYGFLVTKKYKNIGFSIKHLREILLDSTDYRDKEYDSVRHKLYQLLDFCIYHGYLYEDAEFAADLVNQLRASLSELDKEKIYNIEAARLADKLGSSLFSYLRRSVVGKNIQQLKKNAENLEKVKLEDIQISSGKTVSYFTKLMYLLTLFLDGKEINDLLTTLINKFDNIRVFNKTLTQLNQSTEFVEDYSFFGSSGTVFEELTVLNSFARMSRIDPSARKDMYRDAIEILGISMEMSHEKFEEMLDRILCYDEEGNPIINPDGTKKSGMRNFIATNIISSNRFKYLVRYGNATKIRALANCENAVKFVLSTIPDEQIVRYFDSCREPTDHIENNIERKREYLASIIKEMSFERFRDAEKLQRYHVDRPTNGSSVEGEQKQRYQAVIRLYL

SEQ ID NO: 24 - protein, 954 aa, Artificial Sequence; identical to SEQ ID NO: 1
  Eubacterium_siraeum_DSM_15702

SEQ ID NO: 25 - protein, 173 aa, Artificial Sequence
  gut_metagenome_P19E0k2120140920,_c369000003
DGKEINDLVTTLINKTENIASFNEVLKQLGYELDYSEEYSVFAASDEMASQLRALNSFARMEKPDASAKRIMFVEAARMLGDDSSYEELKAYFDDILAKKSKKEFDAATDNEAIRATDKKKKGFRNFIINNVIESDRFKYLIRYCNVESVQAFSKNRKLVKFVLKDIPESQIL

SEQ ID NO: 26 - protein, 111 aa, Artificial Sequence
  Gut_metagenome_contig7593000362
RMSEEAPSAKKVMYVEAAKVLGYSEPEEDLETYIEGILDKKKNVDASGKKNMNFRNFIANNVIESRRFKYLVRYCNPEKIRAMAENRKVVSFVLKGIPDAQIRAYYNSCNG

SEQ ID NO: 27 - protein, 86 aa, Artificial Sequence
  Gut_metagenome_contig12619000055
KLNAGFADKAKTDMQVLLDVLKIKGQEKEIEIAQNYYEFIVKKGYKNEGFSIKKLRQKLTSLSESEKEPLNSMRYDSVRPKLNHLL

SEQ ID NO: 28 - protein, 236 aa, Artificial Sequence
  Gut_metagenome_contig1405000151
KELFQKLCKAPQLAYFNLQIETEGKRKADPNAIKLTQEDFFSILYTLGYMRQMLMHGAPNQNIYKMDPLKDKTFKNCLDCLNRLYNERVMALNNNFLDLAKKNLSILFDVFAVKTQEEKAEYVRDYYDFVVRKQFKNQGFSIKCLREHMTDDIEEAGTLRDQKYDSVRGKLYPFINFAIFRYYNSHSSEAEALVERLRASMNEEEKDKVYRHEAVILWSKIRNLVLKHILPEMEGS

SEQ ID NO: 29 - protein, 103 aa, Artificial Sequence
  Chicken_gut_metagenome_c298474
SDHDKKALVQEYYEFVVLKNYKNLGFSIRRLRDTIIARETGADILSDTEYDTVRSKLYRAMDFKIYLYYQEHPEKAKTLIECLRASTEEAEKEWIYRREASAV

SEQ ID NO: 30 - protein, 225 aa, Artificial Sequence
  Gut_metagenome_contig1516000227
NKFDGESCKSFPLLMYLLCKFLDAKEVNELLTSIINKLENIESLIDALVTLNKWDGFSSNYSLFDKQNIRSLINDFRLVKNLSSSKRKLKKAKQYEYQKNKQLYADAINLFKKDNFVHLNDEEGTGLDLYLSTLLTKKSGNRGDKVKNFIESAIIKNRRFVYLIRYADPEKCYKLVHNEKMLRFVLGEYNEEMMPLSQLQKYYNAVTENNDSNCENRNKMIDTLV

SEQ ID NO: 31 - protein, 210 aa, Artificial Sequence
  Gut_metagenome_contig1838000319
LEYQITPENDVVKLPVSNSSSITVNSANDNIFEVTTSRSDLKDLEAKPSNPTKKSKSSEKSPRQDMLGLKSALEKEYFGKEFNDNIHIQIIHCIQDIEKILAVYSTNANYALVNLLGHNFKDESGKREDFLGSDAFKIEMSYESFSAPANETKLSSEKERTRENEEKRLKYLEDFNNMTDPDNYDKRLGYFGEAFFKPSKNRGKDTVADT

SEQ ID NO: 32 - protein, 84 aa, Artificial Sequence
  Gut_metagenome_contig13123000268
SPKDAGLAYRPAGVRPDQIGAKAALEKRYFGKETPGDNIHVQIAYQIQDIEKLLAVYISNIIYAVNNVTGVSAMKDSKGRPVDL

SEQ ID NO: 33 - protein, 115 aa, Artificial Sequence
  Gut_metagenome_contig5294000434
DKVVHVNVAQGIRDFIEDFKSNSDFSMNSYFELYNYLMQRMLVNEYTKKANDFKVEVPELLITYKNNLDKYKTYDRNFLHIINMPFAYNLARYKNLTIEDIFYDNYKDKLKTKRG

SEQ ID NO: 34 - protein, 377 aa, Artificial Sequence
  Gut_metagenome_contig6415000192
VNSDASDFCKLIYVFTRFLDGKEINILLNSLIKKFQDIHSFNTTVKKLSENNLIINADYVDDYSLFEQSGTVARELMLIKSISKMDFGLDNINLSFMYDDALRTLGVSDENLPEVKREYFGKTKNLSAYIRNNVLENRRFKYVIKYIHPSDVQKIACNKAIAGFVLNRMPDTQIKRYYDSLINKGATDIQAQAKALLDCITGISFDAIKDDKHLHKSKEKSPQRSADRERKKAMLTLYYTIVYIFVKQMLHINSLYTIGFFYLERDQRFIYSRAKKENKNPSKNSYLNDFRSVTAYFIPSEIMKRIEKNENKGFLEDFEALWNSCGKTSRLRKEDVLLYARYISPDHALKNYKMILNSYRNKIAHINVIMSAGKYTG

SEQ ID NO: 35 - protein, 123 aa, Artificial Sequence
  Gut_metagenome_contig6144000300
NKDILKLVIQELPETQILRYYSTIGKNKTTSIDEMKQCLIDAIYNFNIDDTLNAIGDSRVINEKKEQSKAIINLYLTVIYLVTKNMVKINTRFSIAFACLERDYYLHFGQPNGKLLYLQLTEE

SEQ ID NO: 36 - protein, 101 aa, Artificial Sequence
  Gut_metagenome_contig9118000041
DTDCDTQYELFNGDNPGKLANELRICKSLSRMKPEMDEIKKPLYKDALNILNIGNEEFDENTFEFLNREKGDHKLRNFIVNNVIESTRFMYVVKYMNPSNC

SEQ ID NO: 37 - protein, 331 aa, Artificial Sequence
  Activated_sludge_metagenome_transcript_124486
MVKTKAEIHQILRFLGTIRQCLAHKKDAKWDIIFNPDSMSNEFKTLIDSYYNGRVKALNDDFIKHNRSSSLPILFHYYGATEENRRAELTEGFYDFIIKRENKNMGFSLKKIREKMLEKQEASFIKEDGYNSVRHKLYILMDFIIYKTYAADIELQESIVATLRSNLTDEDKEATYEIQAKALWNKIGDDIVKKLMPLIDGNKIKGYKDEKIEIKKEWLKDVMISTENASYMTKMVYFMTLFLDGKEINEFLTVLINKFENIQGFFDVLGHNALAEKIEEPKEISKRPLKGFAELAAFTQKSTDVGLTEHLRLFENSVNISDEIRVTKNFA

SEQ ID NO: 38 - protein, 245 aa, Artificial Sequence
  Gut_metagenome_contig1322000437
INELLTTLINKFDDIQSLMDIATSKQVNVPCKFTSDYSIFNNSSRIVKELNVVKNVARMQKPTASVKTDMLMDALTLLGTDDTMDSEKLRNYVRVQIMKLDAEGKTSKSDDHTLRNFLINNVINSSRFIYVIKYVKADTAYALGHNRKAVAYVLHRIPEQQIDRYYSSCIDRDAGNRMEKENALVDMIVKLSFRDIENVSNDNEKASEKQRYRAVVGLYLTVIYELVKNIVNINSRYVIAFHSLE

SEQ ID NO: 39 - protein, 139 aa, Artificial Sequence
  Gut_metagenome_contig4582000531
SNDHALRNFIVNNVISSSRFTYIIKFINANIAYKIGHNRKAVSYVIKKLPPDQIDRYFTSCIGQESKQAEISDKRQALIDMITTLDYYRFTDINNEDIQKKEQYKAIIGLYLTVVYRLVKNIVNINSRYVIAFHCLERD

SEQ ID NO: 40 - protein, 100 aa, Artificial Sequence
  Gut_metagenome_contig9190000283
FVLNSIPDLQLDRYYKAITGKSDGNRVEKTDIIMDKLMKLDFNQLKVNEDQMGKKNIYFVEKLKALVGLYLTIIYLLTKSLVKINSIYILAFSCFERDYR

SEQ ID NO: 41 - protein, 213 aa, Artificial Sequence
  Gut_metagenome_contig1709000510
PKFKSGSHAQKYYGFIIFKSHKNLGFSIKELRKKLFDIEDAKAFSKKQYDSVRFKMNKLIDFFITYHYTTIDKKQADKLVSKLRYSIDEKEKDDIYTTEAEDLWNKYKSSFEQIRAYVSPDIITEYEHQATNFEYEIKKFDPSTELKTFFSKMIYVLCMFLDGKEINELLSTLINKFDNIDSFITTSEGITDECRFTGTGEKKNIYDIFNASG

SEQ ID NO: 42 - protein, 946 aa, Artificial Sequence
  M24_(LSQX01212483_Anaerobic_digester_metagenome)
MNNKRKTKAKAAGLKSVFFDQKQAVLTTFAKGNNSQIEKKVVNSEVKDLRQPPAFDLELKEKTFYISGKNNINTSRENPLASASLPLSKRQRIRAERIKRAREENRPYHNVKRVGEDDLRAKADLEKHYFGKEYSDNLKIQIIYNILDINKIISPYINDIVYSMNNLARNDEYIDGKIDVIGSLSSTTDYSSFMSPNKDLEKEKKFSFHRENYKKFVEASKPYMRYYGKVFIRDVKKSKLSTGKGEKIEVMYRSDEEIFTIFQILSYVRQSIMHNDIGNKSSILAIEKYPARFVGFLSDLLKTKTNDVNRMFIDNNSQTNFWVLFSIFGLQDHTSGADKICRNFYDFVIKADSKNLGFSLKKIRELMLDLPNANMLRDHQFDTVRSKFYTLLDFIIYQHYLEEKSRIDNMVEKLRMTLKEEEKEVLYAAEAKIVWNAIGAKVINKLVPMMNGDALKEIKRKNRDRKLPQSVIATVQVNSDANVFSGLIYFLTLFLDGKEINEMVSNLITKFENIDSLLHVDREIYKSDEKDLDLEIEKLALFFKGVVRPNAKTDTGAGEISKSFSIFQSAERIIEELKFIKNVTRMDNEIFPSEGVFLDAANVLGVRGDDFDFSNEFVGDDLHSDANKKIINKINGTKEDRNLRNFIINNVVKSRRFQYIARHMNTHYVKQLANNETLNRFVLNKMGDAKIINRYYESISGNTPNIEVRSQIDYLVKRLRSFSFEDLNDVKQKVRPGTNESIEKEKKKALVGLCLTIQYLVYKNLVNINARYTTAFYCLERDSKLKGFGVDVWRDFESYTALTNHFIKEGYLPVRKAEILRANLKHLDCEDGFKYYRNQVTHLNAIRVAYKYINEIKSVHSYFALYHYIMQRHLYDSLQAKAKDSSGFVIDALKKSFEHKIYSKDLLHVLHSPFGYNTARYKNLSIEALFDKNESRPEVNPLSTND

SEQ ID NO: 43 - protein, 150 aa, Artificial Sequence
  Gut_metagenome_contig3833000494
EEASDFKDKKNDSDRRKLYKLMDFCIFYLYYSDSKRNEDLVSRLRESLTDENKDIIYSKEAKTVWNELRKKFSTILDNVKGANIKKLEDVKEKFISEDEFDDIKLDIDISYFSKLMYVMCYFLDGKKINDLLTTLVSKFDNIGSIIEAAK

SEQ ID NO: 44 - protein, 123 aa, Artificial Sequence
  Activated_sludge_metagenome_transcript_117355
MEKMEKIRKSENRKSRAKAAGLKSTFVVADKLALTSFGKGNKANLEKIIKNEEVEEINKPPKFDAKVEEKQIHIIGKTIKDGITEKPAGMRNDLIGAKQELEKMFFGKTFDDNIHIQLIYNIL

SEQ ID NO: 45 - protein, 84 aa, Artificial Sequence
  Gut_metagenome_contig11061000330
SQRDSTINPGEKQISVEKLNPKMVQYAKAVINHGTYCKDAVKALCVPFAYQLVRYKNLTIDGLFDKNHPGDKKEAKTLALDDDV

SEQ ID NO: 46 - protein, 418 aa, Artificial Sequence
  Gut_metagenome_contig338000322
FDNIISFIDILKKLNLEFKFKPEYADFFNMTNCRYTLEELRVINSIARMQKPSADARKIMYRDALRILGMDNRPDEEIDRELERTMPVGADGKFIKGKQGFRNFIASNVIESSRFHYLVRYNNPHKTRTLVKNPNVVKFVLEGIPETQIKRYFDVCKGQEIPPTSDKSAQIDVLARIISSVDYKIFEDVPQSAKINKDDPSRNFSDALKKQRYQAIVSLYLTVMYLITKNLVYVNSRYVIAFHCLERDAFLHGVTLPKMNKKIVYSQLTTHLLTDKNYTTYGHLKNQKGHRKWYVLVKNNLQNSDITAVSSFRNIVAHISVVRNSNEYISGIGELHSYFELYHYLVQSMIAKNNWYDTSHQPKTAEYLNNLKKHHTYCKDFVKAYCIPFGYVVPRYKNLTINELFDRNNPNPEPKEEV

SEQ ID NO: 47 - protein, 418 aa, Artificial Sequence; identical to SEQ ID NO: 46
  Artificial sequence

SEQ ID NO: 48 - protein, 109 aa, Artificial Sequence
  Gut_metagenome_contig9530000097
KSKHYRQCVKEDLLNARKLHTDDYNIDAIRAFRNAVAHLDVVRNMSAYIEGIREINSYYGLYHYLAQRCLQKRCNGALDDNTDYFRTLDKYNTYVKDFVKALCVPFAYN

SEQ ID NO: 49 - protein, 213 aa, Artificial Sequence
  Gut_metagenome_contig1750000258
STPDKARESLRDMLHNISFNDFADVKQDDRRATPEEKVEKERYKAIIGLYLTVMYHLVKNLVYVNSRYVMAFHCLERDAMHYDVCLDNYRDLIRHLISDGDSSCNHFISHNKRMRGCIEEDVNNSEQLIFGKEDAVIRFRNNVAHLSAIRNANEYIDDIREITSYFALYHYLMQRKLIDDCKVNDTAHKYFEKLTKYKTYVMDMVKALCSPFG

SEQ ID NO: 50 - protein, 131 aa, Artificial Sequence
  Gut_metagenome_contig5377000274
KENDILKKSRKKSSVKANGLKSVFVMENKALMTSFGKGNKANPEKELVGGEIRELTDSPVFDASNLGNIIEISRRGVRIEKKGYIASDYEIHKDVINAKDKLEERYFGSAMDDNIHIQMVYQILDIEKILS

SEQ ID NO: 51 - protein, 255 aa, Artificial Sequence
  gut_metagenome_P19E0k2120140920_c248000089
YSADMIDELAGIIHDMKFKQFENVDQSAKRGTPEAADKQQKQNVIRLYLTVCYLFFKNLIYVNSRYFLAFYCLERDVKLWGKTPKFGSREEDTSYTVLTREFMDSGKISTKSKSKNGAESPDEAAKHIPRNYIQKNLDNSDDVAIRYFRNAAEHINALQCAANYLENVEDTESYYRIYHYIMQRYIMQSYSQDKSGGKYDKADARDINDKTKEYFELVENHNTYCKDFVKALCVPFAYNLARFKNLSIDGLFDKN

SEQ ID NO: 52 - protein, 89 aa, Artificial Sequence
  Gut_metagenome_contig11400000031
NIVKHVLKDIPDTQIERYYKSYFNTENAANAEIMREKLASALMQVKYDEFKNVKQKVKNGTEEAFEKERKKALVRLYLTVVYIFVKNLV

SEQ ID NO: 53 - protein, 109 aa, Artificial Sequence
  Gut_metagenome_contig7940000191
NHIDHLNAVRNADKYLNDVRQVTSWYELFHYIVQRALFDDYLKALSYNPDAGKELNPRTLEYFAKVQKYGTCCKDFIKALNVPFAYNLPRYKNLSIDGLFDMNRPGEKG

SEQ ID NO: 54 - protein, 124 aa, Artificial Sequence
  Gut_metagenome_contig6049000251
LYLTSFGKGNAAVIEQKIEPENGYRVTGMQITPSITVNKATDESVRFRVKRKIAQKDEFIADNPMHEGRHRIEPSAGSDMLGLKTKLEKYYFGKEFDDNLHIQIIYNILDIEKILAVYSTNITA

SEQ ID NO: 55 - protein, 233 aa, Artificial Sequence
  Gut_metagenome_contig1137000500
MKKKKNLREQREAKKQERLAACSAKTKAAEIPAAEKPVATTPIAEPVKTDSKKKSSVKAAGLKSTLVLDNKLYTTSFGKGNEAVIEQEVNTADYTVANVNSTPSLEIRSAGDKELSFSSHRQFVNKDELSAVNPLYGGKDKPRKPAGKDMLGLKDKLEERYFGKSFNDNIHIQIIYNILDIEKILAVYATNITVALDHMIDKDVNIEKEDFIGYMNTLNTYEVFMDPSKNPKL

SEQ ID NO: 56 - protein, 69 aa, Artificial Sequence
  Gut_metagenome_contig9368000105
QRHVAEGVEPNRHDFAERFPYYAALYQYHSYVKDFVKALNAPFGYNIPRFKNLTIEELFDRNIHIETYV

SEQ ID NO: 57 - protein, 358 aa, Artificial Sequence
  Gut_metagenome_contig546000275
MDSYRPKLYKLIDFCIFKHYHEYTEISEKNVDTLRAAVSEEQKESFYADEAKRLWGIFDKQFLGFCKKINVWVNGSHEKEILGYIDKDAYRKKSDVSYFSKFLYAMSFFLDGKEINDLLTTLINKFDNIASFISTAKELDAEIDRILEKKLDPVTGKPLKGKNSFRNFIANNVIENKRFIYVIKFCNPKNVLKLVKNTKVTEFVLKRMPESQIDRYYSSCIDTEKNPSVDKKISDLAEMIKKIAFDDFRNVRQKTRTREESLEKERFKAVIGLYLTVVYLLIKNLVNVNSRYVMAFHCLERDAKLYGINIGKNYIELTEDLCRENENSRSAYLARNKRLRDCVKQNIDNAKNMKSKEK

SEQ ID NO: 58 - protein, 114 aa, Artificial Sequence
  Gut_metagenome_contig7216000573
KEMIYANEATFLWDKLGRTFLNFCDNIGAWVKNDHTEEIETYIDKDAYKTSSKVSYFSKLLYAMCFFLDGKEINDLLTTLINKFDNIGSFIETAKELGLSVTFIKDYAFFNASK

SEQ ID NO: 59 - protein, 136 aa, Artificial Sequence
  Gut_metagenome_contig4806000409
LIDSKRLRYFGFEYDPDGKNKNEEMKKRLYHLVAFAGQLRQWSFHSEGNFQLEWLYKLDDSRIAQEYRDTLDYFFDRRFDELNNNFVEQNATNLFILKETFPGEDLKAVTDLYYDFIIVKSQKNIGFSIKKLREKM

SEQ ID NO: 60 - protein, 94 aa, Artificial Sequence
  Gut_metagenome_contig10762000480
CFDTELNPMTEIKIQNLAQKMKDMDFTNFRDVQQKSRDPEKNREKERFKAIIGLYLTVVYRLVKNLADVNARYVMAFHSLERDSSLYNEPVVWK

SEQ ID NO: 61 - protein, 149 aa, Artificial Sequence
  Gut_metagenome_contig4114000374
DTKINPQTWLYQLENTPDLDNEYRDTLDHFFDERFNEINEHFVTQNATNLCIMKEVFPDEDFKSIADLYYDFIVVKSYKNIGFSIKKLREKMLELPEAKRVTSTEMDSVRSKLYKLIDFCIFKHYHEKPETVEMIVSMLRAYTSEDMKE

SEQ ID NO: 62 - protein, 933 aa, Artificial Sequence
  Ruminococcus_flavefaciens_FD1
MKKKMSLREKREAEKQAKKAAYSAASKNTDSKPAEKKAETPKPAEIISDNSRNKTAVKAAGLKSTIISGDKLYMTSFGKGNAAVIEQKIDINDYSFSAMKDTPSLEVDKAESKEISFSSHHPFVKNDKLTTYNPLYGGKDNPEKPVGRDMLGLKDKLEERYFGCTFNDNLHIQIIYNILDIEKILAVHSANITTALDHMVDEDDEKYLNSDYIGYMNTINTYDVFMDPSKNSSLSPKDRKNIDNSRAKFEKLLSTKRLGYFGFDYDANGKDKKKNEEIKKRLYHLTAFAGQLRQWSFHSAGNYPRTWLYKLDSLDKEYLDTLDHYFDKRFNDINDDFVTKNATNLYILKEVFPEANFKDIADLYYDFIVIKSHKNMGFSIKKLREKMLECDGADRIKEQDMDSVRSKLYKLIDFCIFKYYHEFPELSEKNVDILRAAVSDTKKDNLYSDEAARLWSIFKEKFLGFCDKIVVWVTGEHEKDITSVIDKDAYRNRSNVSYFSKLMYAMCFFLDGKEINDLLTTLINKFDNIANQIKTAKELGINTAFVKNYDFFNHSEKYVDELNIVKNIARMKKPSSNAKKAMYHDALTILGIPEDMDEKALDEELDLILEKKTDPVTGKPLKGKNPLRNFIANNVIENSRFIYLIKFCNPENVRKIVNNTKVTEFVLKRIPDAQIERYYKSCTDSEMNPPTEKKITELAGKLKDMNFGNFRNVRQSAKENMEKERFKAVIGLYLTVVYRVVKNLVDVNSRYIMAFHSLERDSQLYNVSVDNDYLALTDTLVKEGDNSRSRYLAGNKRLRDCVKQDIDNAKKWFVSDKYNSITKYRNNVAHLTAVRNCAEFIGDITKIDSYFALYHYLIQRQLAKGLDHERSGFDRNYPQYAPLFKWHTYVKDVVKALNAPFGYNIPRFKNLSIDALFDRNEIKKNDGEKKSDD

SEQ ID NO: 63 - protein, 70 aa, Artificial Sequence
  Gut_metagenome_contig7093000170
RQLAVGLDPKRSGFERNYPYFAKLFEWHTYVKDMVKALNAPFGYNIPRFKNLSIDDLFDMNEERVKDAKA

SEQ ID NO: 64 - protein, 91 aa, Artificial Sequence
  Gut_metagenome_contig11113000384
ASENERKAKQQAGQPAAKGNGEEKQKPILKLNPVRERKLSTTLKSRAKAAGLKSTFVINDKELLMTAFGRGNDAIPEKRILGAQVETLSEK

SEQ ID NO: 65 - protein, 119 aa, Artificial Sequence
  Gut_metagenome_contig6403000259
NKVKEFELDASVKYRLSKVVESVRLKDKATYFTKLIYLTTLFLDGKEINDLLTTLIHQFENIASFIDVMKDRGIADGFSGEYKFFESSKQVAFELRNVNSFARMTKASKDDDNAKQIMF

SEQ ID NO: 66 - protein, 123 aa, Artificial Sequence
  Gut_metagenome_contig6193000124
AEDYYDFLFKKTYKYLGFSIKTLREEFLTIKDAEKLKDKKYDSVRSKLYKVIDFLIFDLYQNRECLRINELVQRLRLSTDELTKAKIYADEAHFVYKKLWDIIDTEIVPQLDQKGIKALEEAY

SEQ ID NO: 67 - protein, 320 aa, Artificial Sequence
  Gut_metagenome_contig721000619
KEGSTMAKNEKKKSTAKALGLKSSFVVNNDIYMTSFGKGNKAVLEKKITENTIENKSDTTYFDVINRDPKGFTLEGRRIADMTAFSNDPKYHVNVVNGKFLEDQLGARSELEKKVFGRTFDDNVHIQLIHNILDIEKIMAQYVSDIVYLLHNTIKRDMNDDIMGYISIRNSFDDFCHPERIPDRKAKDNLQKQHDIFFDEILKCGRLAYFGNAFFEDGSDNKEIAKLKRYKEIYHIIALMGSLRQSYFHGENSDKNFQGPTWAYTLESNLTGKYKEFKDTLDKTFDERYEMISKDFGSTNMVNLQILEELLKMLYGNVSP

SEQ ID NO: 68 - protein, 220 aa, Artificial Sequence
  Gut_metagenome_contig1666000270
KELKFRINGKFIKNYHDRYDEDSANRRWKVVTKQNDVNLFCKLIYMMTLLLDGKEINDLLTTLVNKFDNIASFIDVMEDMGIEHRFIGGYDMFADSKKICVDLQMINSFARMQVTMKSAKKMLYRDALVILGMDQSEEEIERFMLENNIIKDNNEDKSEKKQHDFRNFLINSVINSSRFRYMVRYSSADGLRKLKKSRKLIGFVLNSLPETLIDRYYHSC

SEQ ID NO: 69 - protein, 204 aa, Artificial Sequence
  Gut_metagenome_contig2002000411
EKQNKAKYQAIISLYLMVMYQIVKNMIYVNSRYVIAFHCLERDSNQLLGRFNSRDASMYNKLTQKFITDKYLNDGAQGCSKKVGNYLSHNITCCSDELRKEYRNQVDHFAVVRMIGKYAADIGKFSTWFELYHYVMQRIIFDKRNPLSETERTYKQLIAKHHTYCKDLVKALNTPFGYNLARYKNLSIGELFDRNNYNAKTKET

SEQ ID NO: 70 - protein, 944 aa, Artificial Sequence
  Ruminococcus_albus
MAKKSKGMSLREKRELEKQKRIQKAAVNSVNDTPEKTEEANVVSVNVRTSAENKHSKKSAAKALGLKSGLVIGDELYLTSFGRGNEAKLEKKISGDTVEKLGIGAFEVAERDESTLTLESGRIKDKTARPKDPRHITVDTQGKFKEDMLGIRSVLEKKIFGKTFDDNIHVQLAYNILDVEKIMAQYVSDIVYMLHNTDKTERNDNLMGYMSIRNTYKTFCDTSNLPDDTKQKVENQKREFDKIIKSGRLGYFGEAFMVNSGNSTKLRPEKEIYHIFALMASLRQSYFHGYVKDTDYQGTTWAYTLEDKLKGPSHEFRETIDKIFDEGFSKISKDFGKMNKVNLQILEQMIGELYGSIERQNLTCDYYDFIQLKKHKYLGFSIKRLRETMLETTPAECYKAECYNSERQKLYKLIDFLIYDLYYNRKPARIEEIVDKLRESVNDEEKESIYSVEAKYVYESLSKVLDKSLKNSVSGETIKDLQKRYDDETANRIWDISQHSISGNVNCFCKLIYIMTLMLDGKEINDLLTTLVNKFDNIASFIDVMDELGLEHSFTDNYKMFADSKAICLDLQFINSFARMSKIDDEKSKRQLFRDALVILDIGNKDETWINNYLDSDIFKLDKEGNKLKGARHDFRNFIANNVIKSSRFKYLVKYSSADGMIKLKTNEKLIGFVLDKLPETQIDRYYESCGLDNAVVDKKVRIEKLSGLIRDMKFDDFSGVKTSNKAGDNDKQDKAKYQAIISLYLMVLYQIVKNMIYVNSRYVIAFHCLERDFGMYGKDFGKYYQGCRKLTDHFIEEKYMKEGKLGCNKKVGRYLKNNISCCTDGLINTYRNQVDHFAVVRKIGNYAAYIKSIGSWFELYHYVIQRIVFDEYRFALNNTESNYKNSIIKHHTYCKDMVKALNTPFGYDLPRYKNLSIGDLFDRNNYLNKTKESIDANSSIDSQ

SEQ ID NO: 71 - protein, 449 aa, Artificial Sequence
  Gut_metagenome_contig13552000311
LIDFLIYDLYYNRKPARIEEIVDKLRESVNDEEKESIYSAETKYVYEALGKVLVRSLKKYLNGATIRDLKNRYDAKTANRIWDISEHSKSGHVNCFCKLIYMMTLMLDGKEINDLLTTLVNKFDNIASFIDVMDELGLEHSFTDNYKMFADSKAICLDLQFINSFARMSKIDDEKSKRQLFRDALVVLDIGDKNEDWIEKYLTSDIFKRDENGNKIDGEKRDFRNFIANNVIKSARFKYLVKYSSADGMIKLKKNEKLISFVLEQLPETQIDRYYESCGLDCAVADRKVRIEKLTGLIRDMRFDNFRGVNYSNDACKKDKQAKAKYQAIISLYLMVLYQIVKNMIYVNSRYVIAFHCLERDLLFFNIELDNSYQYSNCNELTEKFIKDKYMKEGALGFNMKAGRYLTKNIGNCSNELRKIYRNQVDHFAVVRKIGNYAADIASVGSWFE

SEQ ID NO: 72 - protein, 96 aa, Artificial Sequence
  Gut_metagenome_contig10037000527
YMDQNFANSDAWAIHVYRNKIQHLDAVRHADMYIGDIREFHSWFELYHYIIQRRIIDQYAYESTPGSSRDGSAIIDEERLNPATRRYFRLITTYKT

SEQ ID NO: 73 - protein, 519 aa, Artificial Sequence
  Gut_metagenome_contig238000329
RYDKDRSKIYTMMDFVIYRYYIDNNNDSIDFINKLRSSIDEKSKEKLYNEEANRLWNKLKEYMLYIKEFNGKLASRTPDRDGNISEFVESLPKIHRLLPRGQKISNFSKLMYLLTMFLDGKEINDLLTTLINKFENIQGFLDIMPEINVNAKFEPEYVFFNKSHEIAGELKLIKGFAQMGEPAATLKLEMTADAIKILGTEKEDAELIKLAESLFKDENGKLLGNKQHGMRNFIGNNVIKSKRFHYLIRYGDPAHLHKIATNKNVVRFVLGRIADMQKKQGQKGKNQIDRYYEVCVGNKDIKKTIEEKIDALTDIIVNMNYDQFEKKKAVIENQNRGKTFEEKNKYKRDNAEREKFKKIISLYLTVIYHILKNIVNVNSRYILGFHCLERDKQLYIEKYNKDKLDGFVALTKFCLGDEERYEDLKAKAQASIQALETANPKLYAKYMNYSDEEKKEEFKKQLNRERVKNARNAYLKNIKNYIMIRLQLRDQTDSSGYLCGEFRDKVAHLEVARHAHEYI

SEQ ID NO: 74 - protein, 181 aa, Artificial Sequence
  Gut_metagenome_contig2643000492
NGEIVSLAEKEAFSAKIADKNIGCKIENKQFRHPKGYDVIADNPIYKGSPRQDMLGLKETLEKRYFSPSDSIDNVRVQVAHNILDIEKILAEYITNAVYSFDNIAGFGKDIIGDDFSPVYTYDKFEKSDRYEYFKNLLNNSRLGYYGQAFFECDDSKENKKKKDAIKCYNIIALLSGLRHW

SEQ ID NO: 75 - protein, 440 aa, Artificial Sequence
  Gut_metagenome_contig874000057
MSKNKESYAKGMGLKSALVSGSKVYMTSFEGGNDAKLEKVVENSEIVSLAEKESFSAEIFKKNIGCKIENKKFKHPKRYDVIADNPLYKGSVRQDMLGLKETLEKRYFNSADGTDNVCIQVIHNILDIEKILAEYITNAVYSFDNIAGFGEDIIGMGGFKPIYTYKQFKEPDKYNKKFDDILNNSRLGYYGKAFFEKNDLKHNPNKKKRDKNPYILKYDNECYYIIALLSGLRHWNIHSHAKDDLVSYRWLYNLDSILNREYISTLNYLYDDIADELTESFSKNSSANVNYIAETLNIDPSEFAQQYFRFSIMKEQKNMGFNVSKLREIMLDRKELSDIRDNHRVFDSIRSKLYTMMDFVIYRYYIEEAAKTEAENRNLPENEKKISEKDFFVINLRGSFDENQKEKLYIEEAKRLWEKLKDIMLKIKEFRGEKVKEYKK

SEQ ID NO: 76 - protein, 137 aa, Artificial Sequence
  Gut_metagenome_contig4781000489
LDKQLDYEYIRTLNYMFNDIADELTRTFSKNSAANVNYIAETLNIDPNKFAEQYFRFSIMKEQKNLGFNLTKLRESMLDRRELSDIRDNHNVFDSIRPKLYTMMDFVIYKHYIDEAKKTEAENKSLPDDRKNLSEKD

SEQ ID NO: 77 - protein, 87 aa, Artificial Sequence
  Gut_metagenome_contig12144000352
RMGEPVANTKRVMMIDAVKILGTDLSDDELKEMADSFFKDSDGNLLKKGKHGMRNFITNNVIKNKRFHYLIRYGDPAHLHEIAKNEA

SEQ ID NO: 78 - protein, 414 aa, Artificial Sequence
  Gut_metagenome_contig5590000448
VHNNEEKDLIKYTWLYNLDKYLDAEYITTLNYMYNDIGDELTDSFSKNSAANINYIAETLGIDPKTFAEQYFRFSIMKEQKNLGFNLTKLREVMLDRKDMSEIRENHNDFDSIRAKVYTMMDFVIYRYYIEEAAKVNAANKSLPDNEKSLSEKDIFVISLRGSFNEDQKDRLYYDEAQRLWSKVGKLMLKIKKFRGKDTRKYKNMGTPRIRRLIPEGRDISTFSKLMYALTMFLDGKEINDLLTTLINKFDNIQSFLKVMPLIGVNAKFAEEYSFFNNSEKIADELRLIKSFARMGEPVADARRAMYIDAIRILGTDLSDDELKALADSFSLDENGNKLGKGKHGMRNFIINNVITNKRFHYLIRYGNPVHLHEIAKNEAVVKFVLGRIADIQKKQGQNGKNQIDRYYETCIGK

SEQ ID NO: 79 - protein, 109 aa, Artificial Sequence
  Gut_metagenome_contig9269000031
LSEKDIFVISLRGSFNEDQKDRLYYDEAQRLWSKLGKLMLKIKEFKGKDTKKYRDMGKPRLRRILPEGRDISTFSKLMYALTMFLDGKEINDLLTTLINKFDNIQSFLK

SEQ ID NO: 80 - protein, 105 aa, Artificial Sequence
  Gut_metagenome_contig8537000520
SARLADELRIVKSVSRMEMPMPAAKTLMFEDALKLFWIDSPEEAKKIISGDNKKIRNFIANNVVESSWFNYIVRYTDLKNARDFIRCRPIVEFVLNKVPETQIDR

SEQ ID NO: 81 - protein, 211 aa, Artificial Sequence
  Gut_metagenome_contig1845000130
SSLNEVEKDAIYAEEAKQAWVNIRDLVIRHILPMMKGDYIAQISVEDEKIDQSILEDVFISKITPSALAEFIYIVTLFIDGKEINDLLTQMIHKFDSIAAFQEVMRQRCMVTQFNQDYAIFEQSGKIAEDLRVVNSFARMSISKDGPNVKGAMFREALLILGLASPDETMESVLQKYMNSNLDRERKSVRNFVINNVIQSRRFHYLVRYGN

SEQ ID NO: 82 - protein, 906 aa, Artificial Sequence
  gut_metagenome_P13E0k2120140920_c3000072
MEREVKKPPKKSLAKAAGLKSTFVISPQEKELAMTAFGRGNDALLQKRIVDGVVRDVAGEKQQFQVQRQDESRFRLQNSRLADRTVTADDPLHRAETPRRQPLGAGMDQLRRKAILEQKYFGRTFDDNIHIQLIYNILDIHKMLAVPANHIVHTLNLLGGYGETDFVGMLPAGLPYDKLRVVKKKNGDTVDIKADIAAYAKRPQLAYLGAAFYDVTPGKSKRDAARGRVKREQDVYTILSLMSLLRQFCAHDSVRIWGQNTPAALYGLQALPQDMKDLLDDGWRRALGGVNDHFLDTNKVNLLTLFEYYGAETKQERVALTQDFYRFVVLKEQKNMGFSLRRLREELLKLPDAAYLTGQEYDSVRQKLYMLLDFLLCRLYAQERADRCEELVSALRCALSDEEKDAVYQAEAAALWQALGDTLRRELLPLLKGKKLQDKDKKKLDELGLSRDVLDGVLFRPAQQGSRANADYFCRLMHLSTWFMDGKEINTLLTTLISKLENIDSLRSVLESMGLAYSFVPAYAMFDHSRYIAGQLRVVNNIARMRKPAIGAKREMYRAAVVLLGVDSPEAAAAITDDLLQIDPETGKVRPRGDSARDTGLRNFVANNVVESRRFTYLLRYMTPEQARVLAQNEKLIAFVLSTVPSAQLERYCRTCGREDITGRPAQIRYLTAQIMGVRYESFTDVEQRGRGDNPKKERYKALIGLYLTVLYLAVKNMVNCNARYVIAFYCRDRDTALYQKEVCWYDLEEDKKSGKQRQVEDYTALTRYFVSQGYLNRHACGYLRSNMNGISNGLLAAYRNAVDHLNVIPPLGSLCRDIGRVDSYFALYHYAVQQYLNGRYYRKTPREQELFAAMAQHRTWCSDLVKALNTPFGYNLARYKNLSIDGLFDREGDHVVREDGEKPAE

SEQ ID NO: 83 - protein, 906 aa, Artificial Sequence
  gut_metagenome_P1E0k2120140920_c1000078
MEREVKKPPKKSLAKAAGLKSTFVISPQEKELAMTAFGRGNDALLQKRIVDGVVRDVAGEKQQFQVQRQDESRFRLQNSRLADRTVTADDPLHRAETPRRQPLGAGMDQLRRKAILEQKYFGRTFDDNIHIQLIYNILDIHKMLAVPANHIVHTLNLLGGYGETDFVGMLPAGLPYDKLRVVKKKNGDTVDIKADIAAYAKRPQLAYLGAAFYDVTPGKSKRDAARGRVKREQDVYAILSLMSLLRQFCAHDSVRIWGQNTTAALYHLQALPQDMKDLLDDGWRRALGGVNDHFLDTNKVNLLTLFEYYGAETKQARVALTQDFYRFVVLKEQKNMGFSLRRLREELLKLPDAAYLTGQEYDSVRQKLYMLLDFLLCRLYAQERADRCEELVSALRCALSDEEKDTVYQAEAAALWQALGDTLRRKLLPLLKGKKLQDKDKKKSDELGLSRDVLDGVLFRPAQQGSRANADYFCRLMHLSTWFMDGKEINTLLTTLISKLENIDSLRSVLESMGLAYSFVPAYAMFDHSRYIAGQLRVVNNIARMRKPAIGAKREMYRAAVVLLGVDSPEAAAAITDDLLQIDPETGKVRPRSDSARDTGLRNFIANNVVESRRFTYLLRYMTPEQARVLAQNEKLIAFVLSTVPDTQLERYCRTCGREDITGRPAQIRYLTAQIMGVRYESFTDVEQRGRGDNPKKERYKALIGLYLTVLYLAVKNMVNCNARYVIAFYCRDRDTALYQKEVCWYDLEEDKKSGKQRQVEDYTALTRYFVSQGYLNRHACGYLRSNMNGISNSLLTAYRNAVDHLNAIPPLGSLCRDIGRVDSYFALYHYAVQQYLNGRYYRKTPREQELFAAMAQHRTWCSDLVKALNTPFGYNLARYKNLSIDGLFDREGDHVVREDGEKPAE

SEQ ID NO: 84 - protein, 84 aa, Artificial Sequence
  Gut_metagenome_contig12990000099
INDLLTTLIHKFENIAAFLHVIQAEKLPVEFVPEFQVFSDSQKIAEELRIINSFARMNKPSANAREIMYIEAFKVLGMSGDEKQ

SEQ ID NO: 85 - protein, 345 aa, Artificial Sequence
  Gut_metagenome_contig525000349
MSKKENRKSYVKGLGLKSTLVSDSKVYLTTFADGSNAKLEKCVENNKIICISNDKEAFAASIANKNVGYKIKNDEKFRHPKGYDIISNNPLLHNNSVQQDMLGLKNVLEKRYFGKSSGGDNNLCIQIIHNIIDIEKILSEYIPNVVYAFNNIAGFKDEHNNIIDIIGTQTYNSSYTYADFSKDKSDKKYIEFQKLLKNKRLGYWGKAFFTGQGNNAKVRQENQCFHIIALLISLRNWATHSNELDKHTKRTWLYKLDDTNILNAEYVKTLNYLYDTIADELTKSFSKNGAVNVNYLAKKYNIKDDLPGFSEQYFRFSIMKEQKNLGFNISKLRENMLDFKDMSVI

SEQ ID NO: 86 - protein, 206 aa, Artificial Sequence
  Gut_metagenome_contig7229000302
KKISSLTKFCLGESDEKKLKALAKKSLEELKTTNSKLYENYIKYSDERKAEEAKRQINRERAKTAMNAHLRNTKWNDIMYGQLKDLADSKSRICSEFRNKAAHLEVARYAHMYINDISEVKSYFRLYHYIMQRRIIDVIENNPKAKYEGKVKVYFEDVKKNKKYNKNLLKLMCVPFGYCIPRFKNLSIEQMFDMNETDNSDKKKEK

SEQ ID NO: 87 - protein, 95 aa, Artificial Sequence
  Gut_metagenome_contig3227000343
IGDISEVNSYFQLYHYIMQRILIDKIGSKTTGKAKEYFDSVIVNKKYDDRLLKLLCSPLGYCLTRYKDLSIEALFDMNEAAKYDKLNKERKNKKK

SEQ ID NO: 88 - protein, 115 aa, Artificial Sequence
  Gut_metagenome_contig7030000469
SIRSKLYTMMDFVIYRYYIEESAKAAAENKPSESDSFVIRLRGSFNENQKEELYIEEAERLWKKFGEIMLKIKEFRGEKVKEYKKEVPRIERILPHGKDISAFSKLMYMLSMFLD

SEQ ID NO: 89 - protein, 110 aa, Artificial Sequence
  Gut_metagenome_contig5149000068
FRNKVAHLEAVRYAHLYINDIAEVNSYFQLYHYIIQRRIMAECYDKSSGKVREYFNAVNKEKKYNDRLLKLLCVPFGYCVTRFKDLSIEALFDKNEADRFDKEKKKAEKK

SEQ ID NO: 90 - protein, 84 aa, Artificial Sequence
  Gut_metagenome_contig400200045
MIEKKKSYAKGMGLKSTIVSGSKVYMTTFGDGSEARLEKVVENDSIKTLHEGEAFSAEMTDNNAGYKIGNVKFSHPNGYDVVAN

SEQ ID NO: 91 - protein, 94 aa, Artificial Sequence
  Gut_metagenome_contig10420000446
SSKSVAEKVNALTKIITGMNYDQFDSRRNVIENTGAGNAEREKYKKIISLYLTVIYHILKNIVNINSRYVIGFHCVERDAQLYKEKGYDINLKK

SEQ ID NO: 92 - protein, 967 aa, Artificial Sequence
  new_flavefaciens,_strain_XPD3002
MIEKKKSFAKGMGVKSTLVSGSKVYMTTFAEGSDARLEKIVEGDSIRSVNEGEAFSAEMADKNAGYKIGNAKFSHPKGYAVVANNPLYTGPVQQDMLGLKETLEKRYFGESADGNDNICIQVIHNILDIEKILAEYITNAAYAVNNISGLDKDIIGFGKFSTVYTYDEFKDPEHHRAAFNNNDKLINAIKAQYDEFDNFLDNPRLGYFGQAFFSKEGRNYIINYGNECYDILALLSGLRHWVVHNNEEESRISRTWLYNLDKNLDNEYISTLNYLYDRITNELTNSFSKNSAANVNYIAETLGINPAEFAEQYFRFSIMKEQKNLGFNITKLREVMLDRKDMSEIRKNHKVFDSIRTKVYTMMDFVIYRYYIEEDAKVAAANKSLPDNEKSLSEKDIFVINLRGSFNDDQKDALYYDEANRIWRKLENIMHNIKEFRGNKTREYKKKDAPRLPRILPAGRDVSAFSKLMYALTMFLDGKEINDLLTTLINKFDNIQSFLKVMPLIGVNAKFVEEYAFFKDSAKIADELRLIKSFARMGEPIADARRAMYIDAIRILGTNLSYDELKALADTFSLDENGNKLKKGKHGMRNFIINNVISNKRFHYLIRYGDPAHLHEIAKNEAVVKFVLGRIADIQKKQGQNGKNQIDRYYETCIGKDKGKSVSEKVDALTKIITGMNYDQFDKKRSVIEDTGRENAEREKFKKIISLYLTVIYHILKNIVNINARYVIGFHCVERDAQLYKEKGYDINLKKLEEKGFSSVTKLCAGIDETAPDKRKDVEKEMAERAKESIDSLESANPKLYANYIKYSDEKKAEEFTRQINREKAKTALNAYLRNTKWNVIIREDLLRIDNKTCTLFRNKAVHLEVARYVHAYINDIAEVNSYFQLYHYIMQRIIMNERYEKSSGKVSEYFDAVNDEKKYNDRLLKLLCVPFGYCIPRFKNLSIEALFDRNEAAKFDKEKKKVSGNS

SEQ ID NO: 93 - protein, 146 aa, Artificial Sequence
  M26_Gut_metagenome_contig698000307
MIEKKKSFAKGMGVKSTLVSGSKVYMTTFAEGSDAKLEKIVEGDSIRSVNEGEAFSAEMADKNAGYKIGNAKFSHPKGYAVVANNPLYTGPVQQDMLGLKETLEKRYFGESADGNDNICIQVIHNILDIEKILAEYITNAAYSVTD

SEQ ID NO: 94 - protein, 724 aa, Artificial Sequence
  M36_Uncultured_Eubacterium_sp_TS28_c40956
RIRFVLSGIFVNAFSSKHGFESGVEINTSNPTHRSGESSPVRGDMLGLKSELEKRFFGKTFDDNIHIQLIYNILDIEKILAVYVTNIVYALNNMLGVKGSESHDDFIGYLSTNNTYDVFIDPDNSSLSDDKKANVRKSLSKFNVLLKTKRLGYFGLEEPKTKDNRVSEAYKKRVYHMLAIVGQIRQCVFHDKSGAKRFDLYSFINNIDPEYRDTLDYLVEERLKSINKDFIQGNKVNISLLIDMMKGYEADDIIRLYYDFIVLKSQKNLGFSIKKLREKMLEEYGFRFKDKQYDSVRSKMYKLMDFLLFCNYYRNDIAAGEALVRKLRFSMTDDEKEGLYADEAAKLWGKFRNDFENIADHMNGDVIKELGKADMDFDEKILDSEKKNASDLLYFSKMIYMLTYFLDGKEINDLLTTLISKFDNIKEFLKIMKSSAVNVECELTAGYKLFNDSQRITNELFIVKNIASMRKPAASAKLTMFRDALTILGIDDKITDDRISEILKLKEKGKGIHGLRNFITNNVIESSRFVYLIKYANAQKIRKVAENEKVVMFVLGGIPDTQIERYYKSCVEFPDMNSSLEVKRSELARMIKNISFDDFKNVKQQAKGQRKRRLRRGQKAVIGLYLTVMYLLVKNLVNVNARYVIAIHCLERDFGLYKEIIPELASKNLKNDYRILSQTLCELCDKSPNLFLKKNERLRKCVEVDINNADSSMTRKYRNCIAHL

SEQ ID NO: 95 - protein, 219 aa, Artificial Sequence
  M12_gut_metagenome_P25C0k2120140920_c134000066
MAKKNKMKPRELREAQKKARQFKAAEINNNAAPAIAAMPAAEVIAPVAEKKKSSVKAAGMKSILVSENKMYITSFGKGNSAVLEYEVDNNDYNKTQLSSKDNSNIELCGVNEVNITFSSKHGFESGVEINTSNPTHRSGESSPVRWDMLGLKSELEKRFFGKTFDDNIHIQLIYNILDIEKILAVYVTNIVYALNNMLGVKGSESHDDFIGYLSTNNIY

SEQ ID NO: 96 - protein, 915 aa, Artificial Sequence
  Artificial sequence
MAKKNKMKPRELREAQKKARQFKAAEINNNAAPAIAAMPAAEVIAPVAEKKKSSVKAAGMKSILVSENKMYITSFGKGNSAVLEYEVDNNDYNKTQLSSKDNSNIELCGVNEVNITFSSKHGFESGVEINTSNPTHRSGESSPVRWDMLGLKSELEKRFFGKTFDDNIHIQLIYNILDIEKILAVYVTNIVYALNNMLGVKGSESHDDFIGYLSTNNIYDVFIDPDNSSLSDDKKANVRKSLSKFNVLLKTKRLGYFGLEEPKTKDTRVSQAYKKRVYHMLAIVGQIRQCVFHDKSGAKRFDLYSFINNIDPEYRETLDYLVDERFDSINKGFIQGNKVNISLLIDMMKGYEADDIIRLYYDFIVLKSQKNLGFSIKKLREKMLEEYGYRFKDKQMYKLMDFLLFCNYYRNDVVAGEALVRKLRFSMTDDEKEGIYADEASKLWGKFRNDFENIADHMNGDVIKELGKADMDFDEKILDSEKKNASDLLYFSKMIYMLTYFLDGKEINDLLTTLISKFDNIKEFLKIMKSSAVDVECELTAGYKLFNDSQRITNELFIVKNIASMRKPASSAKLTMFRDALTILGIDDNITDDRISEILKLKEKGKGIHGLRNFITNNVIESSRFVYLIKYANAQKIREVAKNEKVVMFVLGGIPDTQIERYYKSCVEFPDMNSSLEVKRSELARMIKNISFDDFKNVKQQAKGRENVAKERAKAVIGLYLTVMYLLVKNLVNVNARYVIAIHCLERDFGLYKEIIPELASKNLKNDYRILSQTLCELCDNGDESPNLFLKKNKRLRKCVEVDINNADSNMTRKYRNCIAHLTVVRELKEYIGDIRTVDSYFSIYHYVMQRCITKREDDTKQEEKIKYEDDLLKNHGYTKDFVKALNSPFGYNIPRFKNLSIEQLFDRNEYLTEK

SEQ ID NO: 97 - protein, 922 aa, Artificial Sequence
  M10_gut_metagenome_P25C90k2120140920,_c28000041
MAKKNKMKPRELREAQKKARQFKAAEINNNAAPAIAAMPAAEVIAPVAEKKKSSVKAAGMKSILVSENKMYITSFGKGNSAVLEYEVDNNDYNKTQLSSKDNSNIELCGVNEVNITFSSKHGFESGVEINTSNPTHRSGESSPVRWDMLGLKSELEKRFFGKTFDDNIHIQLIYNILDIEKILAVYVTNIVYALNNMLGVKGSESHDDFIGYLSTNNIYDVFIDPDNSSLSDDKKANVRKSLSKFNVLLKTKRLGYFGLEEPKTKDTRVSQAYKKRVYHMLAIVGQIRQCVFHDKSGAKRFDLYSFINNIDPEYRETLDYLVDERFDSINKGFIQGNKVNISLLIDMMKGYEADDIIRLYYDFIVLKSQKNLGFSIKKLREKMLEEYGYRFKDKQYDSVRSKMYKLMDFLLFCNYYRNDVVAGEALVRKLRFSMTDDEKEGIYADEASKLWGKFRNDFENIADHMNGDVIKELGKADMDFDEKILDSEKKNASDLLYFSKMIYMLTYFLDGKEINDLLTTLISKFDNIKEFLKIMKSSAVDVECELTAGYKLFNDSQRITNELFIVKNIASMRKPASSAKLTMFRDALTILGIDDNITDDRISEILKLKEKGKGIHGLRNFITNNVIESSRFVYLIKYANAQKIREVAKNEKVVMFVLGGIPDTQIERYYKSCVEFPDMNSSLEVKRSELARMIKNISFDDFKNVKQQAKGRENVAKERAKAVIGLYLTVMYLLVKNLVNVNARYVIAIHCLERDFGLYKEIIPELASKNLKNDYRILSQTLCELCDNGDESPNLFLKKNKRLRKCVEVDINNADSNMTRKYRNCIAHLTVVRELKEYIGDIRTVDSYFSIYHYVMQRCITKREDDTKQEEKIKYEDDLLKNHGYTKDFVKALNSPFGYNIPRFKNLSIEQLFDRNEYLTEK

SEQ ID NO: 98 - protein, 922 aa, Artificial Sequence; identical to SEQ ID NO: 97
  M11_gut_metagenome_P25C7k2120140920_c4078000105

SEQ ID NO: 99 - protein, 636 aa, Artificial Sequence
  gut_metagenome_P25C0k2120140920_c32000045
IRQCVFHDKSGAKRFDLYSFINNIDPEYRETLDYLVDERFDSINKGFIQGNKVNISLLIDMMKGYEADDIIRLYYDFIVLKSQKNLGFSIKKLREKMLEEYGYRFKDKQYDSVRSKMYKLMDFLLFCNYYRNDVVAGEALVRKLRFSMTDDEKEGIYADEASKLWGKFRNDFENIADHMNGDVIKELGKADMDFDEKILDSEKKNASDLLYFSKMIYMLTYFLDGKEINDLLTTLISKFDNIKEFLKIMKSSAVDVECELTAGYKLFNDSQRITNELFIVKNIASMRKPASSAKLTMFRDALTILGIDDNITDDRISEILKLKEKGKGIHGLRNFITNNVIESSRFVYLIKYANAQKIREVAKNEKVVMFVLGGIPDTQIERYYKSCVEFPDMNSSLEVKRSELARMIKNISFDDFKNVKQQAKGRENVAKERAKAVIGLYLTVMYLLVKNLVNVNARYVIAIHCLERDFGLYKEIIPELASKNLKNDYRILSQTLCELCDNGDESPNLFLKKNKRLRKCVEVDINNADSNMTRKYRNCIAHLTVVRELKEYIGDIRTVDSYFSIYHYVMQRCITKREDDTKQEEKIKYEDDLLKNHGYTKDFVKALNSPFGYNIPRFKNLSIEQLFDRNEYLTEK

SEQ ID NO: 100 - protein, 929 aa, Artificial Sequence
  M13_gut_metagenome_P23C7k2120140920_c3000067
MAKKNKMKPRELREAQKKARQLKAAEINNNAAPAIAAMPAAQVIAPAAEKKKSSVKAAGMKSILVSENKMYITSFGKGNSAVLEYEVDKVDNNNYNKTQLSSKDNSNIELGDVNEVNITFSSKHGFESGVEINTSNPTHRSGESSPVRWDMLGLKSELEKRFFGKTFDDNIHIQLIYNILDIEKILAVYVTNIVYALNNMLGIKGSESYDDFMGYLSARNTYEVFTHPDKSNLSDKVKGNIKKSFSTFNDLLKTKRLGYFGLEEPKTKDTRVSEAYKKRVYHMLAIVGQIRQCVFHDLSEHSEYDLYSFIDNSKKVYRECRETLNYLVDERFDSINKGFIQGNKVNISLLIDMMKDDYEADDIIHLYYDFIVLKSQKNLGFSIKKLREKMLDEYGFRFKDKQYDSVRSKMYKLMDFLLFCNYYRNDVVAGEALVRKLRFSMTDDEKEGIYADEAEKLWGKFRNDFENIADHMNGDVIKELGKADMDFDEKILDSEKKNASDLLYFSKMIYMLTYFLDGKEINDLLTTLISKFDNIKEFLKIMKSSAVDVECELTAGYKLFNDSQRITNELFIVKNIASMRKPAASAKLTMFRDALTILGIDDKITDDRISEILKLKEKGKGIHGLRNFITNNVIESSRFVYLIKYANAQKIREVAKNEKVVMFVLGGIPDTQIERYYKSCVEFPDMNSSLKVKRSELARMIKNIRFDDFKNVKQQAKGRENVAKERAKAVIGLYLTVMYLLVKNLVNVNARYVIAIHCLERDFGLYKEIIPELASKNLKNDYRILSQTLCELCDDRDESPNLFLKKNRRLRKCVEVDINNADSSMTRKYRNCIAHLTVVRELKEYIGDIRTVDSYFSIYHYVMQRCITKREDDTKQEEKIKYEDDLLKNHGYTKDFVKALNSPFGYNIPRFKNLSIEQLFDRNEYLTEK

SEQ ID NO: 101 - protein, 923 aa, Artificial Sequence
  M5_gut_metagenome_P18E90k2120140920
MAKKNKMKPRELREAQKKARQLKAAEINNNAVPAIAAMPAAEVIAPAAEKKKSSVKAAGMKSILVSENKMYITSFGKGNSAVLEYEVDKVDDNDYNKTQLSSKDNSNIELGNVNEVNITFSSRRGFESGVEINTSNPTHRSGESSSVRGDMLGLKSELEKRFFGKTFDDNIHIQLIYNILDIEKILAVYVTNIVYALNNMLGVKGSESYDDFMGYLSAQNTYYIFTHPDKSNLSDKVKGNIKKSLSKFNDLLKTKRLGYFGLEEPKTKDKRVSEAYKKRVYHMLAIVGQIRQSVFHDKSNELDEYLYSFIDIIDSEYRDTLDYLVDERFDSINKGFIQGNKVNISLLIDMMKDDYEADDIIRLYYDFIVLKSQKNLGFSIKKLREKMLEEYGFRFKDKQYDSVRSKMYKIMDFLLFCNYYRNDVVAGEALVRKLRFSMTDDEKEGIYADEAAKLWGKFRNDFENIADHMNGDVIKELGKADMDFDEKILDSEKKNASDLLYFSKMIYMLTYFLDGKEINDLLTTLISKFDNIKEFLKIMKSSAVDVECELTAGYKLFNDSQRITNELFIVKNIASMRKPAASAKLTMFRDALTILGIDDNITDDRISEILKLKEKGKGIHGLRNFITNNVIESSRFVYLIKYANAQKIREVAKNEKVVMFVLGGIPDTQIERYYKSCVEFPDMNSSLEVKRSELARMIKNICFDDFKNVKQQAKGRENVAKERAKAVIGLYLTVMYLLVKNLVNVNARYVIAIHCLERDFGLYKEIVSELASKNLKNDYRILSQTLCELCDKSPNLFLKKNERLRKCVEVDINNADSSMTRKYRNCIAHLTVVRELKEYIGDIRAVDSYFSIYHYVMQRCITKRGNDTKQEDKIKYEDDLLKNHGYTKDFVKALNSPFGYNIPRFKNLSIEQLFDRNEYLTEK

SEQ ID NO: 102 - protein, 923 aa, Artificial Sequence; identical to SEQ ID NO: 101
  M21_gut_metagenome_P18E0k2120140920

SEQ ID NO: 103 - protein, 926 aa, Artificial Sequence
  M7_gut_metagenome_P38C7k2120140920_c4841000003
  misc_feature (551)..(551): Xaa can be any naturally occurring amino acid
MAKKNKMKPRELREAQKKARQLKAAEINNNAAPAIAAMPAAEAIAPAAEKKKSSVKAAGMKSIFVSENKMYITSFGKGNSAVLEYEVDKVDNNVYNQTQLSSEDSSNIELCGVTKVNITFSSKHGLESGVEISTSNPTHRSGESSPVRWDMLGLKSELEKRFFGKTFDDNIHIQLIYNILDIEKILAVYVTNIVYALNNMLGIKDSESYDDFMGYLSARNTYKVFTHPDKSNLSDKVKGNIKKSFSTFNDLLKTKRLGYFGLEEPKTKDTRVSEAYKKRVYHMLAIVGQIRQCVFHDLSEHSEYDLYSFIDNSKKVYRECRETLNYLVDERFDSINKGFIQGNKVNISLLIDMMKDDYEADDIIHLYYDFIVLKSQKNLGFSIKKLREKMLDEYGFRFKDKQYDSVRSKMYKLMDFLLFCNYYRNDVVAGEALVRKLRFSMTDDEKEGIYADEAEKLWGKFRNDFENIADHMNGDVIKELGKADMDFDEKIIDSEKKNASDLLYFSKMIYMLTYFLDGKEINDLLTTLISKFDNIKEFLKIMKSSAVDVEXELTAGYKLFNDSQRITNELFIVKNIASMRKPAASAKLTMFRDALTILGIDDNITDDRISEILKLKEKGKGIHGLRNFITNNVIESSRFVYLIKYANAQKIREVAKNEKVVMFVLGGIPDTQIERYYKSCVEFPDMNSSLGVKRSELARMIKNISFDDFKNVKQQAKGRENVAKERAKAVIGLYLTVMYLLVKNLVNVNARYVIAIHCLERDFGLYKEIIPELASKNLKNDYRILSQTLCELCDKSPNLFLKKNERLRKCVEVDINNADSSMTRKYRNCIAHLTVVRELKEYIGDICTVDSYFSIYHYVMQRCITKRENDTKQEEKIKYEDDLLKNHGYTKDFVKALNSPFGYNIPRFKNLSIEQLFDRNEYLTEK

SEQ ID NO: 104 - protein, 918 aa, Artificial Sequence
  Ruminococcus_bicirculans
MAKKNKMKPRELREAQKKARQLKAAEINNNAVPAIAAMPAAEAAAPAAEKKKSSVKAAGMKSILVSENKMYITSFGKGNSAVLEYEVDNNDYNKTQLSSKDNSNIELCDVGKVNITFSSRRGFESGVEINTSNPTHRSGESSSVRGDMLGLKSELEKRFFGKNFDDNIHIQLIYNILDIEKILAVYVTNIVYALNNMLGEGDESNYDFMGYLSTFNTYKVFTNPNGSTLSDDKKENIRKSLSKFNALLKTKRLGYFGLEEPKTKDTRASEAYKKRVYHMLAIVGQIRQCVFHDKSGAKRFDLYSFINNIDPEYRETLDYLVDERFDSINKGFIQGNKVNISLLIDMMKGYEADDIIRLYYDFIVLKSQKNLGFSIKKLREKMLDEYGFRFKDKQYDSVRSKMYKLMDFLLFCNYYRNDIAAGESLVRKLRFSMTDDEKEGIYADEAAKLWGKFRNDFENIADHMNGDVIKELGKADMDFDEKILDSEKKNASDLLYFSKMIYMLTYFLDGKEINDLLTTLISKFDNIKEFLKIMKSSAVDVECELTAGYKLFNDSQRITNELFIVKNIASMRKPAASAKLTMFRDALTILGIDDKITDDRISEILKLKEKGKGIHGLRNFITNNVIESSRFVYLIKYANAQKIREVAKNEKVVMFVLGGIPDTQIERYYKSCVEFPDMNSSLGVKRSELARMIKNISFDDFKNVKQQAKGRENVAKERAKAVIGLYLTVMYLLVKNLVNVNARYVIAIHCLERDFGLYKEIIPELASKNLKNDYRILSQTLCELCDKSPNLFLKKNERLRKCVEVDINNADSSMTRKYRNCIAHLTVVRELKEYIGDICTVDSYFSIYHYVMQRCITKRENDTKQEEKIKYEDDLLKNHGYTKDFVKALNSPFGYNIPRFKNLSIEQLFDRNEYLTEK

SEQ ID NO: 105 - protein, 920 aa, Artificial Sequence
  our_cloned_CAG_Ncas1
MAKKNKMKPRELREAQKKARQLKAAEINNNAAPAIAAMPAAEAAAPAAEKKKSSVKAAGMKSILVSENKMYITSFGKGNSAVLEYEVDNNDYNQTQLSSKGSSNIELHGVNEVNITFSSKHGFESGVEINTSNPTHRSGESSPVRWDMLGLKSELEKRFFGKTFDDNIHIQLIYNILDIEKILAVYVTNIVYALNNMLGVKGSESHDDFIGYLSTNNTYDVFIDPDNSSLSDDKKANVRKSLSKFNVLLKTKRLGYFGLEEPKTKDTRVSQAYKKRVYLAIVGQIRQCVFHDKSGAKRFDLYSFINNIDPEYRETLDYLVDERFDSINKGFIEGNKINISLLIDMMKGYEADDIIRLYYDFIVLKSQKNLGFSIKKLREKMLDEYGFRFKDKQYDPVRSKMYKLMDFLLFCNHYRNDVAAGEALVRKLRFSMTDDEKEGIYADEAAKLWGKFRNDFENIADHMNGDVIKELGKADMDFDEKILDSEKKNASDLLYFSKMIYMLTYFLDGKEINDLLTTLISKFDNIKEFLKIMKSSAVDVECELTAGYKLFNDSQRITNELFIVKNIASMRKPAASAKLTMFRDALTILGIDDNITDDRISEILKLKEKGKGIHGLRNFITNNVIESSRFVYLIKYANAQKIREVAKNEKVVMFVLGGIPDTHIERYYKSCVEFPDMNSSLEAKRSELARMIKNISFDDFKNVKQQAKGRENVAKERAKAVIGLYLTVMYLLVKNLVNVNARYVIAIHCLERDFGLYKEIIPELASKNLKNDYRILSQTLCELCDDRDESPNLFLKKNKRLRKCVEVDINNADSSMTRKYRNCIAHLTVVRELKEYIGDIRTVDSYFSIYHYVMQRCITKRENDTKQEEKIKYEDDLLKNHGYTKDFVKALNSPFGYNIPRFKNLSIEQLFDRNEYLTEK

SEQ ID NO: 106 - protein, 922 aa, Artificial Sequence
  consensus_1
  misc_feature (89)..(89): Xaa can be any naturally occurring amino acid
  misc_feature (386)..(386): Xaa can be any naturally occurring amino acid
  misc_feature (789)..(790): Xaa can be any naturally occurring amino acid
MAKKNKMKPRELREAQKKARQLKAAEINNNAAPAIAAMPAAEVIAPAAEKKKSSVKAAGMKSILVSENKMYITSFGKGNSAVLEYEVDXNNDYNKTQLSSKDNSNIELGDVNEVNITFSSKHGFESGVEINTSNPTHRSGESSPVRWDMLGLKSELEKRFFGKTFDDNIHIQLIYNILDIEKILAVYVTNIVYALNNMLGIKGSESYDDFMGYLSARNTYDVFTHPDKSNLSDKVKGNIKKSLSKFNDLLKTKRLGYFGLEEPKTKDTRVSEAYKKRVYHMLAIVGQIRQCVFHDKSGAKRFDLYSFIDNIDPEYRDTLDYLVDERFDSINKGFIQGNKVNISLLIDMMKGYEADDIIRLYYDFIVLKSQKNLGFSIKKLREKMLXEYGFRFKDKQYDSVRSKMYKLMDFLLFCNYYRNDVVAGEALVRKLRFSMTDDEKEGIYADEAAKLWGKFRNDFENIADHMNGDVIKELGKADMDFDEKILDSEKKNASDLLYFSKMIYMLTYFLDGKEINDLLTTLISKFDNIKEFLKIMKSSAVDVECELTAGYKLFNDSQRITNELFIVKNIASMRKPAASAKLTMFRDALTILGIDDNITDDRISEILKLKEKGKGIHGLRNFITNNVIESSRFVYLIKYANAQKIREVAKNEKVVMFVLGGIPDTQIERYYKSCVEFPDMNSSLEVKRSELARMIKNISFDDFKNVKQQAKGRENVAKERAKAVIGLYLTVMYLLVKNLVNVNARYVIAIHCLERDFGLYKEIIPELASKNLKNDYRILSQTLCELCDXXESPNLFLKKNKRLRKCVEVDINNADSSMTRKYRNCIAHLTVVRELKEYIGDIRTVDSYFSIYHYVMQRCITKREDDTKQEEKIKYEDDLLKNHGYTKDFVKALNSPFGYNIPRFKNLSIEQLFDRNEYLTEK

SEQ ID NO: 107 - protein, 922 aa, Artificial Sequence
  M18_gut_metagenome_P22E0k2120140920_c3395000078
MAKKNKMKPRELREAQKKARQLKAAEINNNAAPAIAAMPAAEVIAPVAEKKKSSVKAAGMKSILVSENKMYITSFGKGNSAVLEYEVDNNDYNKTQLSSKDNSNIELGDVNEVNITFSSKHGFGSGVEINTSNPTHRSGESSPVRGDMLGLKSELEKRFFGKTFDDNIHIQLIYNILDIEKILAVYVTNIVYALNNMLGIKDSESYDDFMGYLSARNTYEVFTHPDKSNLSDKVKGNIKKSLSKFNDLLKTKRLGYFGLEEPKTKDTRASEAYKKRVYHMLAIVGQIRQCVFHDKSGAKRFDLYSFINNIDPEYRDTLDYLVEERLKSINKDFIEGNKVNISLLIDMMKGYEADDIIRLYYDFIVLKSQKNLGFSIKKLREKMLEEYGFRFKDKQYDSVRSKMYKLMDFLLFCNYYRNDVAAGEALVRKLRFSMTDDEKEGIYADEAAKLWGKFRNDFENIADHMNGDVIKELGKADMDFDEKILDSEKKNASDLLYFSKMIYMLTYFLDGKEINDLLTTLISKFDNIKEFLKIMKSSAVDVECELTAGYKLFNDSQRITNELFIVKNIASMRKPAASAKLTMFRDALTILGIDDNITDDRISEILKLKEKGKGIHGLRNFITNNVIESSRFVYLIKYANAQKIREVAKNEKVVMFVLGGIPDTQIERYYKSCVEFPDMNSSLEAKRSELARMIKNISFDDFKNVKQQAKGRENVAKERAKAVIGLYLTVMYLLVKNLVNVNARYVIAIHCLERDFGLYKEIIPELASKNLKNDYRILSQTLCELCDDRNESSNLFLKKNKRLRKCVEVDINNADSSMTRKYRNCIAHLTVVRELKEYIGDIRTVDSYFSIYHYVMQRCITKRGDDTKQEEKIKYEDDLLKNHGYTKDFVKALNSPFGYNIPRFKNLSIEQLFDRNEYLTEK

SEQ ID NO: 108 - protein, 922 aa, Artificial Sequence; identical to SEQ ID NO: 107
  M17_gut_metagenome_P22E90k2120140920_c114

SEQ ID NO: 109 - protein, 922 aa, Artificial Sequence
  Ruminococcus_sp_CAG57
MAKKNKMKPRELREAQKKARQLKAAEINNNAAPAIAAMPAAEVIAPVAEKKKSSVKAAGMKSILVSENKMYITSFGKGNSAVLEYEVDNNDYNKTQLSSKDNSNIELGDVNEVNITFSSKHGFGSGVEINTSNPTHRSGESSPVRGDMLGLKSELEKRFFGKTFDDNIHIQLIYNILDIEKILAVYVTNIVYALNNMLGIKDSESYDDFMGYLSARNTYEVFTHPDKSNLSDKVKGNIKKSLSKFNDLLKTKRLGYFGLEEPKTKDTRASEAYKKRVYHMLAIVGQIRQCVFHDKSGAKRFDLYSFINNIDPEYRDTLDYLVEERLKSINKDFIEGNKVNISLLIDMMKGYEADDIIRLYYDFIVLKSQKNLGFSIKKLREKMLEEYGFRFKDKQYDSVRSKMYKLMDFLLFCNYYRNDVAAGEALVRKLRFSMTDDEKEGIYADEAAKLWGKFRNDFENIADHMNGDVIKELGKADMDFDEKILDSEKKNASDLLYFSKMIYMLTYFLDGKEINDLLTTLISKFDNIKEFLKIMKSSAVDVECELTAGYKLFNDSQRITNELFIVKNIASMRKPAASAKLTMFRDALTILGIDDNITDDRISEILKLKEKGKGIHGLRNFITNNVIESSRFVYLIKYANAQKIREVAKDEKVVMFVLGGIPDTQIERYYKSCVEFPDMNSSLEAKRSELARMIKNISFDDFKNVKQQAKGRENVAKERAKAVIGLYLTVMYLLVKNLVNVNARYVIAIHCLERDFGLYKEIIPELASKNLKNDYRILSQTLCELCDDRNESSNLFLKKNKRLRKCVEVDINNADSSMTRKYRNCIAHLTVVRELKEYIGDIRTVDSYFSIYHYVMQRCITKRGDDTKQEEKIKYEDDLLKNHGYTKDFVKALNSPFGYNIPRFKNLSIEQLFDRNEYLTEK

SEQ ID NO: 110 - protein, 531 aa, Artificial Sequence
  gut_metagenome_P11E90k2120140920_c43000123
FRFKDKQYDSVRSKMYKLMDFLLFCNYYRNDVVAGEALVRKLRFSMTDDEKEGIYADEAAKLWGKFRNDFENIADHMNGDVIKELGKADMDFDEKILDSEKKNASDLLYFSKMIYMLTYFLDGKEINDLLTTLISKFDNIKEFLKIMKSSAVDVECELTAGYKLFNDSQRITNELFIVKNIASMRKPAASARLTMFRDALTILGIDDKITDDRISEILKLKEKGKGIHGLRNFITNNVIESSRFVYLIKYANAQKIREVAKNEKVVMFVLGGIPDTQIERYYKSCVEFPDMNSSLEAKRSELARMIKNISFDDFKNVKQQAKGRENVAKERAKAVIGLYLTVMYLLVKNLVNVNARYVIAIHCLERDFGLYKEIIPELASKNLKNDYRILSQTLCELCDKSPNLFLKKNERLRKCVEVDINNADSSMTRKYRNCIAHLTVVRELKEYIGDIRTVDSYFSIYHYVMQRCITKRENDTKQEDKIKYEDDLLKNHGYTKDFVKALNSPFGYNIPRFKNLSIEQLFDRNEYLTEK

SEQ ID NO: 111 - protein, 925 aa, Artificial Sequence
  M6_gut_metagenome_P13E90k2120140920_c7000009
MAKKNKMKPRELREAQKKARQLKAAEIKNNAVPAIAAMPAAEAAAPAVEKKKSSVKAAGMKSILVSENKMYITSFGKGNSAVLEYEVDKVDNNNYNKTQLSSKDNSNIELGDVNEVNITFSSKRGNESGVEINTSNPTHRSGESSPVRWDMLGLKSELEKRFFGKTFDDNIHIQLIYNILDIEKILAVYVTNIVYALNNMLGIKGSESYDDFMGYLSARNTYEVFTHPDKSNLSDKVKGNIKKSLSKFNDLLKTKRLGYFGLEEPKTKDTRVSQAYKKRVYHMLAIVGQIRQCVFHDKSGAKRFDLYSFINNIDPEYRDTLDYLVEERLKSINKDFIEGNKVNISLLIDMMKGYEADDIIRLYYDFIVLKSQKNLGFSIKKLREKMLEEYGYRFKDKQYDSVRSKMYKLMDFLLFCNYYRNDVVAGEALVRKLRFSMTDDEKEGIYADEASKLWGKFRNDFENIADHMNGDVIKELGKADMDFDEKILDSEKKNASDLLYFSKMIYMLTYFLDGKEINDLLTTLISKFDNIKEFLKIMKSSAVDVECELTAGYKLFNDSQRITNELFIVKNIASMRKPAASAKLTMFRDALTILGIDDKITDDRISEILKLKEKGKGIHGLRNFITNNVIESSRFVYLIKYANAQKIREVAKNEKVVMFVLGGIPDTQIERYYKSCVEFPDMNSSLEAKRSELARMIKNIRFDDFKNVKQQAKGRENVAKERAKAVIGLYLTVMYLLVKNLVNVNARYVIAIHCLERDFGLYKEIIPELASKNLKNDYRILSQTLCELCDDRDESPNLFLKKNKRLRKCVEVDINNADSSMTRKYRNCIAHLTVVRELKEYIGDIRTVDSYFSIYHYVMQRCITKREDDTKQEEKIKYEDDLLKNHGYTKDFVKALNSPFGYNIPRFKNLSIEQLFDRNEYLTEK

SEQ ID NO: 112 - protein, 921 aa, Artificial Sequence
  M19_gut_metagenome_P17E90k2120140920
MAKKNKMKPRERREAQKKARQLKAAEINNNAVPAIAAMHAAEVIAPAAEKKKSSVKAAGMKSILVSENKMYITSFGKGNSAVLEYEVDNNDYNQTQLSSKDNSNIELCGVTKVNITFSSKHGFESGVEINTSNPTHRSGESSPVRGDMLGLKSELEKRFFGKTFDDNIHIQLIYNILDIEKILAVYVTNIVYALNNMLGEGDESNYDFMGYLSTFNTYKVFTNPNGSTLSDDKKENIRKSLSKFNALLKTKRLGYFGLEEPKTKDTRASEAYKKRVYHMLAIVGQIRQCVFHDKSGAKRFDLYSFINNIYPEYRDTLDYLVEERLKSINKDFIQGNKVNISLLIDMMKGYEADDIIRLYYDFIVLKSQKNLGFSIKKLREKMLDEYGFRFKDKQYDSVRSKMYKLMDFLLFCNYYRNDVVAGEALVRKLRFSMTDDEKEGIYADEAAKLWGKFRNDFENIADHMNGDVIKELGKADMDFDEKILDSEKKNASDLLYFSKMIYMLTYFLDGKEINDLLTTLISKFDNIKEFLKIMKSSAVDVECELTAGYKLFNDSQRITNELFIVKNIASMRKPAASAKLTMFRDALTILGIDDKITDDRISEILKLKEKGKGIHGLRNFITNNVIESSRFVYLIKYANAQKIREVAKNEKVVMFVLGGIPDTQIERYYKSCVEFPDMNSSLEAKRSELARMIKNISFDDFKNVKQQAKGRENVAKERAKAVIGLYLTVMYLLVKNLVNVNARYVIAIHCLERDFGLYKEIIPELASKNLKNDYRILSQTLCELCDDRDESPNLFLKKNKRLRKCVEVDINNADSSMTRKYRNCIAHLTVVRELKKYIGDIRTVDSYFSIYHYVMQRCITKREDDTKQEEKIKYEDDLLKNHGYTKDFVKALNSPFGYNIPRFKNLSIEQLFDRNEYLTEK

SEQ ID NO: 113 - protein, 234 aa, Artificial Sequence
  gut_metagenome_P17E0k2120140920,_c87000043
MYFSKMIYMLTYFLDGKEINDLLTTLISKFDNIKEFLKIMKSSAVDVECELTAGYKLFNDSQRITNELFIVKNIASMRKPAASAKLTMFRDALTILGIDDKITDDRISEILKLKEKGKGIHGLRNFITNNVIESSRFVYLIKYANAQKIREVAKNEKVVMFVLGGIPDTQIERYYKSCVEFPDMNSSLEAKRSELARMIKNISFDDFKNVKQQAKGRENVAKERAKAVIGLYLT

SEQ ID NO: 114 - DNA, 2859 bp, Artificial Sequence
  Human codon-optimized Eubacterium siraeum nCas1
ggcaagaagatccatgccagggacctcagggagcaaagaaagaccgataggacagaaaagttcgccgatcagaacaagaagagggaggctgagagagctgtgcccaaaaaagacgccgccgtctccgtgaagagcgtgtccagcgtcagcagcaagaaggacaacgtcaccaagagcatggccaaggccgccggagtgaagtccgtctttgctgtgggaaacaccgtgtacatgacctccttcggcaggggcaacgatgccgtgctggagcagaaaatcgtggacacctcccatgagcccctgaatatcgacgatcccgcctatcaactcaacgtggtgaccatgaatggatacagcgtcacaggccatagaggagagacagtgtccgccgtgacagataatcccctgaggagattcaacggcaggaagaaggacgaacccgagcagagcgtccctacagacatgctctgcctgaagcccaccctcgagaaaaaattttttggaaaggagtttgatgacaacattcatattcagctgatctataatatcctggatatcgagaaaatcctggccgtgtactccaccaacgccatctacgctctcaacaacatgtccgccgacgaaaacatcgagaactccgacttcttcatgaaaagaacaacagacgagacctttgacgacttcgagaagaagaaggagagcaccaacagcagagagaaagctgactttgacgcctttgaaaagttcatcggaaactataggctggcctatttcgctgacgctttctacgtgaataaaaagaaccccaagggaaaggccaagaatgtcctgagggaggacaaggagctctacagcgtgctgacactgatcggaaagctgagacactggtgtgtccacagcgaggaaggaagggctgaattctggctgtacaagctggacgagctcaaagacgatttcaagaacgtcctggatgtggtgtataacagacccgtggaggagatcaacaacaggttcatcgaaaataacaaagtcaacatccagatcctgggctccgtgtataagaacaccgacatcgccgagctggtgaggtcctactatgagttcctgatcaccaaaaaatacaagaatatgggcttttccatcaagaagctcagggagagcatgctggagggcaagggctacgctgataaggagtacgatagcgtgagaaataagctgtaccagatgaccgatttcatcctctacaccggctacatcaacgaagatagcgatagggctgacgacctggtgaacacactgaggagctccctcaaggaggacgacaaaacaaccgtctactgcaaggaggccgattacctgtggaaaaagtacagggaaagcattagagaagtcgccgatgccctggatggcgacaacattaagaagctgtccaagagcaatattgagattcaggaggataagctgagaaaatgtttcattagctatgctgatagcgtgagcgagtttaccaagctgatctacctcctcacaagattcctgagcggcaaggagatcaatgacctggtgaccaccctgatcaacaagttcgataatattagatcctttctggagattatggatgaactgggcctggacaggacatttaccgccgagtacagcttcttcgaaggctccacaaagtacctggccgagctcgtggagctgaatagctttgtgaagtcctgctccttcgacatcaatgccaagaggaccatgtacagggacgccctggatatcctgggcatcgagtccgacaagaccgaggaggatattgagaagatgattgataatatcctgcagatcgacgccaacggagataaaaagctgaagaaaaacaacggactgagaaacttcatcgcttccaacgtcatcgacagcaatagattcaaatacctggtcaggtacggcaaccccaagaagattagagagacagccaagtgcaagcccgctgtgaggttcgtgctgaacgaaattcccgacgcccagatcgaaaggtactatgaggcttgctgccccaagaacaccgccctctgcagcgccaataagagaagggagaagctggccgacatgatcgctgagatcaaattcgagaattttagcgatgccggcaattaccagaaggctaacgtcacatccaggaccagcgaggccgagatcaagagaaaaaaccaggccattattaggctctatctgacagtgatgtatattatgctgaaaaacctggtgaacgtgaatgccaggtacgtcattgccttccactgcgtggaaagggacaccaagctgtacgccgaaagcggcctggaagtgggcaacatcgaaaagaacaaaacaaacctcaccatggccgtgatgggagtgaaactcgaaaacggaattatcaagacagagttcgataagagcttcgccgagaacgccgctaacagatacctgaggaacgccaggtggtataaactgatcctggacaacctgaaaaaatccgagagagccgtggtgaatgagttcagaaataccgtgtgccacctgaatgccatcaggaacatcaatatcaacatcaaggaaattaaggaggtggagaattatttcgctctgtaccactacctgatccagaagcacctggagaacaggttcgccgataagaaggtggaaagggatacaggcgatttcatcagcaaactggaggagcacaagacctattgcaaagactttgtgaaggcttactgcaccccctttggctacaacctggtgagatataagaatctcaccattgacggcctcttcgacaagaactaccctggcaaggatgactccgatgagcagaag

SEQ ID NO: 115 - DNA, 2862 bp, Artificial Sequence
  Human codon-optimized Eubacterium siraeum nCas1 HEPN-/-
ggcaagaagatccatgccagggacctcagggagcaaagaaagaccgataggacagaaaagttcgccgatcagaacaagaagagggaggctgagagagctgtgcccaaaaaagacgccgccgtctccgtgaagagcgtgtccagcgtcagcagcaagaaggacaacgtcaccaagagcatggccaaggccgccggagtgaagtccgtctttgctgtgggaaacaccgtgtacatgacctccttcggcaggggcaacgatgccgtgctggagcagaaaatcgtggacacctcccatgagcccctgaatatcgacgatcccgcctatcaactcaacgtggtgaccatgaatggatacagcgtcacaggccatagaggagagacagtgtccgccgtgacagataatcccctgaggagattcaacggcaggaagaaggacgaacccgagcagagcgtccctacagacatgctctgcctgaagcccaccctcgagaaaaaattttttggaaaggagtttgatgacaacattcatattcagctgatctataatatcctggatatcgagaaaatcctggccgtgtactccaccaacgccatctacgctctcaacaacatgtccgccgacgaaaacatcgagaactccgacttcttcatgaaaagaacaacagacgagacctttgacgacttcgagaagaagaaggagagcaccaacagcagagagaaagctgactttgacgcctttgaaaagttcatcggaaactataggctggcctatttcgctgacgctttctacgtgaataaaaagaaccccaagggaaaggccaagaatgtcctgagggaggacaaggagctctacagcgtgctgacactgatcggaaagctggcacactggtgtgtcgccagcgaggaaggaagggctgaattctggctgtacaagctggacgagctcaaagacgatttcaagaacgtcctggatgtggtgtataacagacccgtggaggagatcaacaacaggttcatcgaaaataacaaagtcaacatccagatcctgggctccgtgtataagaacaccgacatcgccgagctggtgaggtcctactatgagttcctgatcaccaaaaaatacaagaatatgggcttttccatcaagaagctcagggagagcatgctggagggcaagggctacgctgataaggagtacgatagcgtgagaaataagctgtaccagatgaccgatttcatcctctacaccggctacatcaacgaagatagcgatagggctgacgacctggtgaacacactgaggagctccctcaaggaggacgacaaaacaaccgtctactgcaaggaggccgattacctgtggaaaaagtacagggaaagcattagagaagtcgccgatgccctggatggcgacaacattaagaagctgtccaagagcaatattgagattcaggaggataagctgagaaaatgtttcattagctatgctgatagcgtgagcgagtttaccaagctgatctacctcctcacaagattcctgagcggcaaggagatcaatgacctggtgaccaccctgatcaacaagttcgataatattagatcctttctggagattatggatgaactgggcctggacaggacatttaccgccgagtacagcttcttcgaaggctccacaaagtacctggccgagctcgtggagctgaatagctttgtgaagtcctgctccttcgacatcaatgccaagaggaccatgtacagggacgccctggatatcctgggcatcgagtccgacaagaccgaggaggatattgagaagatgattgataatatcctgcagatcgacgccaacggagataaaaagctgaagaaaaacaacggactgagaaacttcatcgcttccaacgtcatcgacagcaatagattcaaatacctggtcaggtacggcaaccccaagaagattagagagacagccaagtgcaagcccgctgtgaggttcgtgctgaacgaaattcccgacgcccagatcgaaaggtactatgaggcttgctgccccaagaacaccgccctctgcagcgccaataagagaagggagaagctggccgacatgatcgctgagatcaaattcgagaattttagcgatgccggcaattaccagaaggctaacgtcacatccaggaccagcgaggccgagatcaagagaaaaaaccaggccattattaggctctatctgacagtgatgtatattatgctgaaaaacctggtgaacgtgaatgccaggtacgtcattgccttccactgcgtggaaagggacaccaagctgtacgccgaaagcggcctggaagtgggcaacatcgaaaagaacaaaacaaacctcaccatggccgtgatgggagtgaaactcgaaaacggaattatcaagacagagttcgataagagcttcgccgagaacgccgctaacagatacctgaggaacgccaggtggtataaactgatcctggacaacctgaaaaaatccgagagagccgtggtgaatgagttcgcaaataccgtgtgcgccctgaatgccatcaggaacatcaatatcaacatcaaggaaattaaggaggtggagaattatttcgctctgtaccactacctgatccagaagcacctggagaacaggttcgccgataagaaggtggaaagggatacaggcgatttcatcagcaaactggaggagcacaagacctattgcaaagactttgtgaaggcttactgcaccccctttggctacaacctggtgagatataagaatctcaccattgacggcctcttcgacaagaactaccctggcaaggatgactccgatgagcagaagtga

SEQ ID NO: 116 - DNA, 2892 bp, Artificial Sequence
  Human codon-optimized Eubacterium siraeum nCas1 with N-terminal NLS
agccccaagaagaagagaaaggtggaggccagcggcaagaagatccatgccagggacctcagggagcaaagaaagaccgataggacagaaaagttcgccgatcagaacaagaagagggaggctgagagagctgtgcccaaaaaagacgccgccgtctccgtgaagagcgtgtccagcgtcagcagcaagaaggacaacgtcaccaagagcatggccaaggccgccggagtgaagtccgtctttgctgtgggaaacaccgtgtacatgacctccttcggcaggggcaacgatgccgtgctggagcagaaaatcgtggacacctcccatgagcccctgaatatcgacgatcccgcctatcaactcaacgtggtgaccatgaatggatacagcgtcacaggccatagaggagagacagtgtccgccgtgacagataatcccctgaggagattcaacggcaggaagaaggacgaacccgagcagagcgtccctacagacatgctctgcctgaagcccaccctcgagaaaaaattttttggaaaggagtttgatgacaacattcatattcagctgatctataatatcctggatatcgagaaaatcctggccgtgtactccaccaacgccatctacgctctcaacaacatgtccgccgacgaaaacatcgagaactccgacttcttcatgaaaagaacaacagacgagacctttgacgacttcgagaagaagaaggagagcaccaacagcagagagaaagctgactttgacgcctttgaaaagttcatcggaaactataggctggcctatttcgctgacgctttctacgtgaataaaaagaaccccaagggaaaggccaagaatgtcctgagggaggacaaggagctctacagcgtgctgacactgatcggaaagctgagacactggtgtgtccacagcgaggaaggaagggctgaattctggctgtacaagctggacgagctcaaagacgatttcaagaacgtcctggatgtggtgtataacagacccgtggaggagatcaacaacaggttcatcgaaaataacaaagtcaacatccagatcctgggctccgtgtataagaacaccgacatcgccgagctggtgaggtcctactatgagttcctgatcaccaaaaaatacaagaatatgggcttttccatcaagaagctcagggagagcatgctggagggcaagggctacgctgataaggagtacgatagcgtgagaaataagctgtaccagatgaccgatttcatcctctacaccggctacatcaacgaagatagcgatagggctgacgacctggtgaacacactgaggagctccctcaaggaggacgacaaaacaaccgtctactgcaaggaggccgattacctgtggaaaaagtacagggaaagcattagagaagtcgccgatgccctggatggcgacaacattaagaagctgtccaagagcaatattgagattcaggaggataagctgagaaaatgtttcattagctatgctgatagcgtgagcgagtttaccaagctgatctacctcctcacaagattcctgagcggcaaggagatcaatgacctggtgaccaccctgatcaacaagttcgataatattagatcctttctggagattatggatgaactgggcctggacaggacatttaccgccgagtacagcttcttcgaaggctccacaaagtacctggccgagctcgtggagctgaatagctttgtgaagtcctgctccttcgacatcaatgccaagaggaccatgtacagggacgccctggatatcctgggcatcgagtccgacaagaccgaggaggatattgagaagatgattgataatatcctgcagatcgacgccaacggagataaaaagctgaagaaaaacaacggactgagaaacttcatcgcttccaacgtcatcgacagcaatagattcaaatacctggtcaggtacggcaaccccaagaagattagagagacagccaagtgcaagcccgctgtgaggttcgtgctgaacgaaattcccgacgcccagatcgaaaggtactatgaggcttgctgccccaagaacaccgccctctgcagcgccaataagagaagggagaagctggccgacatgatcgctgagatcaaattcgagaattttagcgatgccggcaattaccagaaggctaacgtcacatccaggaccagcgaggccgagatcaagagaaaaaaccaggccattattaggctctatctgacagtgatgtatattatgctgaaaaacctggtgaacgtgaatgccaggtacgtcattgccttccactgcgtggaaagggacaccaagctgtacgccgaaagcggcctggaagtgggcaacatcgaaaagaacaaaacaaacctcaccatggccgtgatgggagtgaaactcgaaaacggaattatcaagacagagttcgataagagcttcgccgagaacgccgctaacagatacctgaggaacgccaggtggtataaactgatcctggacaacctgaaaaaatccgagagagccgtggtgaatgagttcagaaataccgtgtgccacctgaatgccatcaggaacatcaatatcaacatcaaggaaattaaggaggtggagaattatttcgctctgtaccactacctgatccagaagcacctggagaacaggttcgccgataagaaggtggaaagggatacaggcgatttcatcagcaaactggaggagcacaagacctattgcaaagactttgtgaaggcttactgcaccccctttggctacaacctggtgagatataagaatctcaccattgacggcctcttcgacaagaactaccctggcaaggatgactccgatgagcagaag

SEQ ID NO: 117 - DNA, 2931 bp, Artificial Sequence
  Human codon-optimized Eubacterium siraeum nCas1 with N- and C-terminal NLS tags
agccccaagaagaagagaaaggtggaggccagcggcaagaagatccatgccagggacctcagggagcaaagaaagaccgataggacagaaaagttcgccgatcagaacaagaagagggaggctgagagagctgtgcccaaaaaagacgccgccgtctccgtgaagagcgtgtccagcgtcagcagcaagaaggacaacgtcaccaagagcatggccaaggccgccggagtgaagtccgtctttgctgtgggaaacaccgtgtacatgacctccttcggcaggggcaacgatgccgtgctggagcagaaaatcgtggacacctcccatgagcccctgaatatcgacgatcccgcctatcaactcaacgtggtgaccatgaatggatacagcgtcacaggccatagaggagagacagtgtccgccgtgacagataatcccctgaggagattcaacggcaggaagaaggacgaacccgagcagagcgtccctacagacatgctctgcctgaagcccaccctcgagaaaaaattttttggaaaggagtttgatgacaacattcatattcagctgatctataatatcctggatatcgagaaaatcctggccgtgtactccaccaacgccatctacgctctcaacaacatgtccgccgacgaaaacatcgagaactccgacttcttcatgaaaagaacaacagacgagacctttgacgacttcgagaagaagaaggagagcaccaacagcagagagaaagctgactttgacgcctttgaaaagttcatcggaaactataggctggcctatttcgctgacgctttctacgtgaataaaaagaaccccaagggaaaggccaagaatgtcctgagggaggacaaggagctctacagcgtgctgacactgatcggaaagctgagacactggtgtgtccacagcgaggaaggaagggctgaattctggctgtacaagctggacgagctcaaagacgatttcaagaacgtcctggatgtggtgtataacagacccgtggaggagatcaacaacaggttcatcgaaaataacaaagtcaacatccagatcctgggctccgtgtataagaacaccgacatcgccgagctggtgaggtcctactatgagttcctgatcaccaaaaaatacaagaatatgggcttttccatcaagaagctcagggagagcatgctggagggcaagggctacgctgataaggagtacgatagcgtgagaaataagctgtaccagatgaccgatttcatcctctacaccggctacatcaacgaagatagcgatagggctgacgacctggtgaacacactgaggagctccctcaaggaggacgacaaaacaaccgtctactgcaaggaggccgattacctgtggaaaaagtacagggaaagcattagagaagtcgccgatgccctggatggcgacaacattaagaagctgtccaagagcaatattgagattcaggaggataagctgagaaaatgtttcattagctatgctgatagcgtgagcgagtttaccaagctgatctacctcctcacaagattcctgagcggcaaggagatcaatgacctggtgaccaccctgatcaacaagttcgataatattagatcctttctggagattatggatgaactgggcctggacaggacatttaccgccgagtacagcttcttcgaaggctccacaaagtacctggccgagctcgtggagctgaatagctttgtgaagtcctgctccttcgacatcaatgccaagaggaccatgtacagggacgccctggatatcctgggcatcgagtccgacaagaccgaggaggatattgagaagatgattgataatatcctgcagatcgacgccaacggagataaaaagctgaagaaaaacaacggactgagaaacttcatcgcttccaacgtcatcgacagcaatagattcaaatacctggtcaggtacggcaaccccaagaagattagagagacagccaagtgcaagcccgctgtgaggttcgtgctgaacgaaattcccgacgcccagatcgaaaggtactatgaggcttgctgccccaagaacaccgccctctgcagcgccaataagagaagggagaagctggccgacatgatcgctgagatcaaattcgagaattttagcgatgccggcaattaccagaaggctaacgtcacatccaggaccagcgaggccgagatcaagagaaaaaaccaggccattattaggctctatctgacagtgatgtatattatgctgaaaaacctggtgaacgtgaatgccaggtacgtcattgccttccactgcgtggaaagggacaccaagctgtacgccgaaagcggcctggaagtgggcaacatcgaaaagaacaaaacaaacctcaccatggccgtgatgggagtgaaactcgaaaacggaattatcaagacagagttcgataagagcttcgccgagaacgccgctaacagatacctgaggaacgccaggtggtataaactgatcctggacaacctgaaaaaatccgagagagccgtggtgaatgagttcagaaataccgtgtgccacctgaatgccatcaggaacatcaatatcaacatcaaggaaattaaggaggtggagaattatttcgctctgtaccactacctgatccagaagcacctggagaacaggttcgccgataagaaggtggaaagggatacaggcgatttcatcagcaaactggaggagcacaagacctattgcaaagactttgtgaaggcttactgcaccccctttggctacaacctggtgagatataagaatctcaccattgacggcctcttcgacaagaactaccctggcaaggatgactccgatgagcagaagggatccggacctaagaaaaagaggaaggtggcggccgct

SEQ ID NO: 118 - DNA, 2754 bp, Artificial Sequence
  Human codon-optimized uncultured Ruminococcus sp. nCas1
gccaagaagaacaagatgaaacccagggagctgagagaggctcagaagaaggctaggcaactgaaagccgccgagatcaataacaatgccgcccctgccatcgccgctatgcccgctgccgaagtcatcgctcccgccgccgaaaagaagaagagctccgtgaaagccgctggaatgaagtccattctggtgtccgagaacaaaatgtatatcacctccttcggcaaaggcaattccgctgtgctggagtatgaggtggacaacaacgactacaatcagacccagctcagcagcaaggataactccaacatccagctgggcggcgtgaatgaagtgaatatcaccttcagcagcaagcacggatttgagtccggagtcgagattaacacaagcaaccctacccacaggtccggagaaagcagccctgtcagaggagacatgctgggactgaaaagcgagctggagaagagattctttggaaagacctttgatgacaatatccacatccagctcatttacaacatcctggatatcgagaaaatcctggccgtgtatgtgaccaacatcgtgtacgctctgaacaacatgctcggcgtcaagggcagcgagtcccacgacgactttattggctatctgtccaccaacaatatttacgatgtcttcattgaccccgacaacagcagcctctccgacgacaaaaaagccaacgtcaggaagagcctcagcaaattcaacgccctgctgaagaccaagaggctcggatactttggcctggaggaacccaagaccaaggacaacagagtgagccaggcctataagaaaagggtgtaccacatgctggccatcgtgggccagatcagacagtgcgtgttccatgacaagtccggcgccaagagattcgacctgtactccttcattaacaacatcgaccctgagtacagggatacactggattacctcgtggaggagaggctgaagagcatcaacaaagactttattgaggacaacaaagtcaacatcagcctgctgatcgatatgatgaagggctacgaagctgacgacatcatcaggctgtactatgatttcattgtcctgaagagccagaagaacctgggattctccattaagaaactgagagaaaagatgctcgacgagtacggcttcaggttcaaggacaagcagtatgacagcgtgagatccaagatgtacaagctgatggattttctcctgttttgcaactattacaggaacgacatcgccgccggcgaatccctggtcaggaaactgagattcagcatgaccgacgacgagaaggaaggcatctacgccgacgaagccgctaagctgtggggaaaatttagaaatgacttcgagaacatcgctgaccacatgaacggcgatgtgatcaaggagctcggcaaggctgacatggatttcgacgagaagatcctggattccgagaagaagaatgccagcgatctgctgtacttcagcaagatgatttacatgctcacatattttctcgatggcaaggagatcaacgatctcctgaccacactgatcagcaagttcgacaacattaaagagttcctcaaaattatgaaatccagcgccgtggatgtcgagtgcgaactcaccgccggctacaagctcttcaacgacagccagaggatcaccaatgagctgttcattgtgaaaaatatcgctagcatgaggaaacccgccgcctccgctaaactgacaatgtttagagatgccctcaccatcctgggcatcgacgataagatcacagacgacagaattagcggaatcctgaagctcaaggaaaagggcaagggaatccatggcctcagaaatttcattaccaataacgtgatcgaaagcagcaggttcgtgtatctgatcaagtacgccaatgcccaaaagatcagggaggtggccaagaacgaaaaggtggtgatgttcgtgctgggcggcattcctgacacacagatcgaaaggtactacaagagctgtgtggagttccccgatatgaactccagcctgggcgtgaagagatccgaactggctaggatgatcaagaatattagcttcgacgacttcaagaacgtgaagcaacaggccaaaggaagggagaacgtcgccaaagagagagccaaggccgtgatcggactctacctgaccgtcatgtacctcctcgtgaagaacctggtgaacgtgaacgctagatacgtcatcgccatccattgcctcgagagggacttcggactgtacaaggagatcattcccgagctggccagcaaaaatctcaagaacgattacagaatcctgagccaaaccctgtgcgagctgtgtgacaagtcccccaacctgtttctgaagaagaatgaaaggctgagaaagtgcgtcgaagtcgacatcaacaacgctgacagctccatgaccaggaaatacaggaactgtatcgcccatctgaccgtggtgagggaactcaaggagtacatcggagatatctgcaccgtggactcctacttcagcatttatcactacgtgatgcagaggtgcattaccaagagagaaaatgacacaaagcaggaggagaagattaagtacgaggacgatctgctgaaaaaccacggatacaccaaggatttcgtcaaggccctcaatagccccttcggctacaatatccctaggtttaaaaacctgagcatcgagcagctgtttgacagaaatgaatacctgacagagaag

SEQ ID NO: 119 - DNA, 2757 bp, Artificial Sequence
  Human codon-optimized uncultured Ruminococcus sp. nCas1 HEPN-/-
atggccaagaagaacaagatgaaacccagggagctgagagaggctcagaagaaggctaggcaactgaaagccgccgagatcaataacaatgccgcccctgccatcgccgctatgcccgctgccgaagtcatcgctcccgccgccgaaaagaagaagagctccgtgaaagccgctggaatgaagtccattctggtgtccgagaacaaaatgtatatcacctccttcggcaaaggcaattccgctgtgctggagtatgaggtggacaacaacgactacaatcagacccagctcagcagcaaggataactccaacatccagctgggcggcgtgaatgaagtgaatatcaccttcagcagcaagcacggatttgagtccggagtcgagattaacacaagcaaccctacccacaggtccggagaaagcagccctgtcagaggagacatgctgggactgaaaagcgagctggagaagagattctttggaaagacctttgatgacaatatccacatccagctcatttacaacatcctggatatcgagaaaatcctggccgtgtatgtgaccaacatcgtgtacgctctgaacaacatgctcggcgtcaagggcagcgagtcccacgacgactttattggctatctgtccaccaacaatatttacgatgtcttcattgaccccgacaacagcagcctctccgacgacaaaaaagccaacgtcaggaagagcctcagcaaattcaacgccctgctgaagaccaagaggctcggatactttggcctggaggaacccaagaccaaggacaacagagtgagccaggcctataagaaaagggtgtaccacatgctggccatcgtgggccagatcgcacagtgcgtgttcgctgacaagtccggcgccaagagattcgacctgtactccttcattaacaacatcgaccctgagtacagggatacactggattacctcgtggaggagaggctgaagagcatcaacaaagactttattgaggacaacaaagtcaacatcagcctgctgatcgatatgatgaagggctacgaagctgacgacatcatcaggctgtactatgatttcattgtcctgaagagccagaagaacctgggattctccattaagaaactgagagaaaagatgctcgacgagtacggcttcaggttcaaggacaagcagtatgacagcgtgagatccaagatgtacaagctgatggattttctcctgttttgcaactattacaggaacgacatcgccgccggcgaatccctggtcaggaaactgagattcagcatgaccgacgacgagaaggaaggcatctacgccgacgaagccgctaagctgtggggaaaatttagaaatgacttcgagaacatcgctgaccacatgaacggcgatgtgatcaaggagctcggcaaggctgacatggatttcgacgagaagatcctggattccgagaagaagaatgccagcgatctgctgtacttcagcaagatgatttacatgctcacatattttctcgatggcaaggagatcaacgatctcctgaccacactgatcagcaagttcgacaacattaaagagttcctcaaaattatgaaatccagcgccgtggatgtcgagtgcgaactcaccgccggctacaagctcttcaacgacagccagaggatcaccaatgagctgttcattgtgaaaaatatcgctagcatgaggaaacccgccgcctccgctaaactgacaatgtttagagatgccctcaccatcctgggcatcgacgataagatcacagacgacagaattagcggaatcctgaagctcaaggaaaagggcaagggaatccatggcctcagaaatttcattaccaataacgtgatcgaaagcagcaggttcgtgtatctgatcaagtacgccaatgcccaaaagatcagggaggtggccaagaacgaaaaggtggtgatgttcgtgctgggcggcattcctgacacacagatcgaaaggtactacaagagctgtgtggagttccccgatatgaactccagcctgggcgtgaagagatccgaactggctaggatgatcaagaatattagcttcgacgacttcaagaacgtgaagcaacaggccaaaggaagggagaacgtcgccaaagagagagccaaggccgtgatcggactctacctgaccgtcatgtacctcctcgtgaagaacctggtgaacgtgaacgctagatacgtcatcgccatccattgcctcgagagggacttcggactgtacaaggagatcattcccgagctggccagcaaaaatctcaagaacgattacagaatcctgagccaaaccctgtgcgagctgtgtgacaagtcccccaacctgtttctgaagaagaatgaaaggctgagaaagtgcgtcgaagtcgacatcaacaacgctgacagctccatgaccaggaaatacgcgaactgtatcgccgctctgaccgtggtgagggaactcaaggagtacatcggagatatctgcaccgtggactcctacttcagcatttatcactacgtgatgcagaggtgcattaccaagagagaaaatgacacaaagcaggaggagaagattaagtacgaggacgatctgctgaaaaaccacggatacaccaaggatttcgtcaaggccctcaatagccccttcggctacaatatccctaggtttaaaaacctgagcatcgagcagctgtttgacagaaatgaatacctgacagagaag

SEQ ID NO: 120 - DNA, 2787 bp, Artificial Sequence
  Human codon-optimized uncultured Ruminococcus sp. nCas1 with N-terminal NLS
agccccaagaagaagagaaaggtggaggccagcgccaagaagaacaagatgaaacccagggagctgagagaggctcagaagaaggctaggcaactgaaagccgccgagatcaataacaatgccgcccctgccatcgccgctatgcccgctgccgaagtcatcgctcccgccgccgaaaagaagaagagctccgtgaaagccgctggaatgaagtccattctggtgtccgagaacaaaatgtatatcacctccttcggcaaaggcaattccgctgtgctggagtatgaggtggacaacaacgactacaatcagacccagctcagcagcaaggataactccaacatccagctgggcggcgtgaatgaagtgaatatcaccttcagcagcaagcacggatttgagtccggagtcgagattaacacaagcaaccctacccacaggtccggagaaagcagccctgtcagaggagacatgctgggactgaaaagcgagctggagaagagattctttggaaagacctttgatgacaatatccacatccagctcatttacaacatcctggatatcgagaaaatcctggccgtgtatgtgaccaacatcgtgtacgctctgaacaacatgctcggcgtcaagggcagcgagtcccacgacgactttattggctatctgtccaccaacaatatttacgatgtcttcattgaccccgacaacagcagcctctccgacgacaaaaaagccaacgtcaggaagagcctcagcaaattcaacgccctgctgaagaccaagaggctcggatactttggcctggaggaacccaagaccaaggacaacagagtgagccaggcctataagaaaagggtgtaccacatgctggccatcgtgggccagatcagacagtgcgtgttccatgacaagtccggcgccaagagattcgacctgtactccttcattaacaacatcgaccctgagtacagggatacactggattacctcgtggaggagaggctgaagagcatcaacaaagactttattgaggacaacaaagtcaacatcagcctgctgatcgatatgatgaagggctacgaagctgacgacatcatcaggctgtactatgatttcattgtcctgaagagccagaagaacctgggattctccattaagaaactgagagaaaagatgctcgacgagtacggcttcaggttcaaggacaagcagtatgacagcgtgagatccaagatgtacaagctgatggattttctcctgttttgcaactattacaggaacgacatcgccgccggcgaatccctggtcaggaaactgagattcagcatgaccgacgacgagaaggaaggcatctacgccgacgaagccgctaagctgtggggaaaatttagaaatgacttcgagaacatcgctgaccacatgaacggcgatgtgatcaaggagctcggcaaggctgacatggatttcgacgagaagatcctggattccgagaagaagaatgccagcgatctgctgtacttcagcaagatgatttacatgctcacatattttctcgatggcaaggagatcaacgatctcctgaccacactgatcagcaagttcgacaacattaaagagttcctcaaaattatgaaatccagcgccgtggatgtcgagtgcgaactcaccgccggctacaagctcttcaacgacagccagaggatcaccaatgagctgttcattgtgaaaaatatcgctagcatgaggaaacccgccgcctccgctaaactgacaatgtttagagatgccctcaccatcctgggcatcgacgataagatcacagacgacagaattagcggaatcctgaagctcaaggaaaagggcaagggaatccatggcctcagaaatttcattaccaataacgtgatcgaaagcagcaggttcgtgtatctgatcaagtacgccaatgcccaaaagatcagggaggtggccaagaacgaaaaggtggtgatgttcgtgctgggcggcattcctgacacacagatcgaaaggtactacaagagctgtgtggagttccccgatatgaactccagcctgggcgtgaagagatccgaactggctaggatgatcaagaatattagcttcgacgacttcaagaacgtgaagcaacaggccaaaggaagggagaacgtcgccaaagagagagccaaggccgtgatcggactctacctgaccgtcatgtacctcctcgtgaagaacctggtgaacgtgaacgctagatacgtcatcgccatccattgcctcgagagggacttcggactgtacaaggagatcattcccgagctggccagcaaaaatctcaagaacgattacagaatcctgagccaaaccctgtgcgagctgtgtgacaagtcccccaacctgtttctgaagaagaatgaaaggctgagaaagtgcgtcgaagtcgacatcaacaacgctgacagctccatgaccaggaaatacaggaactgtatcgcccatctgaccgtggtgagggaactcaaggagtacatcggagatatctgcaccgtggactcctacttcagcatttatcactacgtgatgcagaggtgcattaccaagagagaaaatgacacaaagcaggaggagaagattaagtacgaggacgatctgctgaaaaaccacggatacaccaaggatttcgtcaaggccctcaatagccccttcggctacaatatccctaggtttaaaaacctgagcatcgagcagctgtttgacagaaatgaatacctgacagagaag

SEQ ID NO: 121 - DNA, 2826 bp, Artificial Sequence
  Human codon-optimized uncultured Ruminococcus sp. nCas1 with N- and C-terminal NLS tags
agccccaagaagaagagaaaggtggaggccagcgccaagaagaacaagatgaaacccagggagctgagagaggctcagaagaaggctaggcaactgaaagccgccgagatcaataacaatgccgcccctgccatcgccgctatgcccgctgccgaagtcatcgctcccgccgccgaaaagaagaagagctccgtgaaagccgctggaatgaagtccattctggtgtccgagaacaaaatgtatatcacctccttcggcaaaggcaattccgctgtgctggagtatgaggtggacaacaacgactacaatcagacccagctcagcagcaaggataactccaacatccagctgggcggcgtgaatgaagtgaatatcaccttcagcagcaagcacggatttgagtccggagtcgagattaacacaagcaaccctacccacaggtccggagaaagcagccctgtcagaggagacatgctgggactgaaaagcgagctggagaagagattctttggaaagacctttgatgacaatatccacatccagctcatttacaacatcctggatatcgagaaaatcctggccgtgtatgtgaccaacatcgtgtacgctctgaacaacatgctcggcgtcaagggcagcgagtcccacgacgactttattggctatctgtccaccaacaatatttacgatgtcttcattgaccccgacaacagcagcctctccgacgacaaaaaagccaacgtcaggaagagcctcagcaaattcaacgccctgctgaagaccaagaggctcggatactttggcctggaggaacccaagaccaaggacaacagagtgagccaggcctataagaaaagggtgtaccacatgctggccatcgtgggccagatcagacagtgcgtgttccatgacaagtccggcgccaagagattcgacctgtactccttcattaacaacatcgaccctgagtacagggatacactggattacctcgtggaggagaggctgaagagcatcaacaaagactttattgaggacaacaaagtcaacatcagcctgctgatcgatatgatgaagggctacgaagctgacgacatcatcaggctgtactatgatttcattgtcctgaagagccagaagaacctgggattctccattaagaaactgagagaaaagatgctcgacgagtacggcttcaggttcaaggacaagcagtatgacagcgtgagatccaagatgtacaagctgatggattttctcctgttttgcaactattacaggaacgacatcgccgccggcgaatccctggtcaggaaactgagattcagcatgaccgacgacgagaaggaaggcatctacgccgacgaagccgctaagctgtggggaaaatttagaaatgacttcgagaacatcgctgaccacatgaacggcgatgtgatcaaggagctcggcaaggctgacatggatttcgacgagaagatcctggattccgagaagaagaatgccagcgatctgctgtacttcagcaagatgatttacatgctcacatattttctcgatggcaaggagatcaacgatctcctgaccacactgatcagcaagttcgacaacattaaagagttcctcaaaattatgaaatccagcgccgtggatgtcgagtgcgaactcaccgccggctacaagctcttcaacgacagccagaggatcaccaatgagctgttcattgtgaaaaatatcgctagcatgaggaaacccgccgcctccgctaaactgacaatgtttagagatgccctcaccatcctgggcatcgacgataagatcacagacgacagaattagcggaatcctgaagctcaaggaaaagggcaagggaatccatggcctcagaaatttcattaccaataacgtgatcgaaagcagcaggttcgtgtatctgatcaagtacgccaatgcccaaaagatcagggaggtggccaagaacgaaaaggtggtgatgttcgtgctgggcggcattcctgacacacagatcgaaaggtactacaagagctgtgtggagttccccgatatgaactccagcctgggcgtgaagagatccgaactggctaggatgatcaagaatattagcttcgacgacttcaagaacgtgaagcaacaggccaaaggaagggagaacgtcgccaaagagagagccaaggccgtgatcggactctacctgaccgtcatgtacctcctcgtgaagaacctggtgaacgtgaacgctagatacgtcatcgccatccattgcctcgagagggacttcggactgtacaaggagatcattcccgagctggccagcaaaaatctcaagaacgattacagaatcctgagccaaaccctgtgcgagctgtgtgacaagtcccccaacctgtttctgaagaagaatgaaaggctgagaaagtgcgtcgaagtcgacatcaacaacgctgacagctccatgaccaggaaatacaggaactgtatcgcccatctgaccgtggtgagggaactcaaggagtacatcggagatatctgcaccgtggactcctacttcagcatttatcactacgtgatgcagaggtgcattaccaagagagaaaatgacacaaagcaggaggagaagattaagtacgaggacgatctgctgaaaaaccacggatacaccaaggatttcgtcaaggccctcaatagccccttcggctacaatatccctaggtttaaaaacctgagcatcgagcagctgtttgacagaaatgaatacctgacagagaagggatccggacctaagaaaaagaggaaggtggcggccgct

SEQ ID NO: 122 - DNA, 2803 bp, Artificial Sequence
  Human codon-optimized Ruminococcus flavefaciens FD1 nCas1
aagaaaaaaatgagcctcagagagaagagggaagccgagaaacaagccaaaaaagccgcctacagcgctgcctccaaaaacacagatagcaaacctgctgagaagaaggccgagacacccaagcctgctgagattatttccgacaactccagaaacaaaaccgccgtcaaggccgccggcctgaaatccacaattatctccggcgataagctgtacatgaccagcttcggaaagggcaacgccgccgtgatcgagcagaaaattgatattaatgattactccttctccgccatgaaggatacccccagcctggaagtggacaaggccgagagcaaggagatctccttctccagccaccacccttttgtcaaaaatgataaactgaccacctataatcccctgtacggcggaaaagataaccccgaaaagcccgtgggcagagatatgctcggcctcaaagacaagctcgaggagaggtacttcggatgcaccttcaatgacaacctgcacattcagattatctataacatcctcgacattgagaaaattctggccgtgcactccgccaacattaccacagctctggaccacatggtggacgaggacgatgagaagtacctcaatagcgattacattggctacatgaacaccatcaacacctatgatgtgttcatggacccctccaaaaattcctccctctcccccaaggacaggaagaacattgataacagcagggccaagtttgagaagctcctgtccacaaagaggctcggctactttggctttgactacgatgccaacggcaaggataagaagaaaaacgaggagatcaagaaaaggctctatcacctgacagcctttgccggccagctcaggcagtggtccttccatagcgccggcaattatcccagaacctggctctacaagctcgatagcctggacaaagagtatctcgacaccctggaccattattttgataagagattcaacgatattaatgacgatttcgtcaccaagaacgccacaaacctgtacatcctgaaggaggtcttccccgaggctaatttcaaggatatcgccgatctctactacgatttcattgtcatcaaaagccataagaatatgggattttccatcaagaagctgagggagaagatgctggagtgcgatggagctgatagaatcaaggaacaggacatggactccgtgaggagcaagctgtataagctgatcgatttttgcattttcaaatactaccacgagttccctgagctgagcgagaagaacgtcgacatcctcagggctgccgtgagcgataccaaaaaggacaacctgtatagcgacgaggccgctaggctctggagcatcttcaaggaaaagttcctgggcttctgcgacaagattgtggtgtgggtgaccggcgagcacgagaaagacatcacctccgtgattgacaaggacgcttacaggaacaggtccaacgtgagctacttttccaagctgatgtacgccatgtgtttcttcctggatggaaaggaaattaacgatctgctgaccacactgatcaacaaattcgacaacattgccaaccagatcaagaccgccaaggagctcggcattaacaccgccttcgtgaaaaactacgattttttcaaccacagcgaaaagtacgtggacgagctgaacattgtgaaaaacatcgccaggatgaaaaagccctccagcaacgccaagaaggccatgtaccatgacgccctgacaatcctgggcatccccgaggatatggacgagaaggccctggatgaggagctcgatctcatcctggaaaagaagaccgatcccgtgaccggaaagcccctcaaaggcaaaaatcccctgaggaattttatcgctaataatgtgattgagaatagcaggttcatttacctgattaaattttgcaaccctgagaatgtcaggaaaatcgtgaacaacacaaaggtgaccgagttcgtgctcaagaggatccccgatgcccagatcgagaggtactacaagagctgtaccgattccgagatgaaccctcccacagaaaagaagatcaccgagctggccggcaagctgaaagatatgaattttggaaacttcaggaacgtgaggcagtccgccaaggaaaacatggagaaagagaggttcaaggccgtcattggcctgtacctcaccgtcgtctacagagtggtcaaaaacctggtggacgtcaatagcaggtacatcatggccttccatagcctggagagagattcccagctgtacaacgtgagcgtcgataatgattacctggccctcaccgacaccctggtcaaggagggcgacaacagcaggtccaggtacctggccggaaataaaaggctgagggattgcgtgaagcaagacatcgacaatgccaaaaagtggttcgtctccgacaagtacaactccattacaaagtacaggaacaacgtggcccacctgaccgccgtgagaaactgcgccgagttcatcggcgacattaccaagatcgactcctacttcgccctctaccactacctcattcagagacagctggctaagggcctcgatcatgagaggtccggattcgacaggaattacccccagtacgcccctctgttcaaatggcacacctacgtgaaggatgtcgtcaaggccctgaacgcccccttcggatacaatatccctaggttcaagaatctgagcatcgacgccctctttgataggaatgaaatcaagaagaacgatggcgagaagaagtccgacgactgagcct

SEQ ID NO: 123 - DNA, 2799 bp, Artificial Sequence
  Human codon-optimized Ruminococcus flavefaciens FD1 nCas1 HEPN-/-
aagaaaaaaatgagcctcagagagaagagggaagccgagaaacaagccaaaaaagccgcctacagcgctgcctccaaaaacacagatagcaaacctgctgagaagaaggccgagacacccaagcctgctgagattatttccgacaactccagaaacaaaaccgccgtcaaggccgccggcctgaaatccacaattatctccggcgataagctgtacatgaccagcttcggaaagggcaacgccgccgtgatcgagcagaaaattgatattaatgattactccttctccgccatgaaggatacccccagcctggaagtggacaaggccgagagcaaggagatctccttctccagccaccacccttttgtcaaaaatgataaactgaccacctataatcccctgtacggcggaaaagataaccccgaaaagcccgtgggcagagatatgctcggcctcaaagacaagctcgaggagaggtacttcggatgcaccttcaatgacaacctgcacattcagattatctataacatcctcgacattgagaaaattctggccgtgcactccgccaacattaccacagctctggaccacatggtggacgaggacgatgagaagtacctcaatagcgattacattggctacatgaacaccatcaacacctatgatgtgttcatggacccctccaaaaattcctccctctcccccaaggacaggaagaacattgataacagcagggccaagtttgagaagctcctgtccacaaagaggctcggctactttggctttgactacgatgccaacggcaaggataagaagaaaaacgaggagatcaagaaaaggctctatcacctgacagcctttgccggccagctcgcgcagtggtccttcgctagcgccggcaattatcccagaacctggctctacaagctcgatagcctggacaaagagtatctcgacaccctggaccattattttgataagagattcaacgatattaatgacgatttcgtcaccaagaacgccacaaacctgtacatcctgaaggaggtcttccccgaggctaatttcaaggatatcgccgatctctactacgatttcattgtcatcaaaagccataagaatatgggattttccatcaagaagctgagggagaagatgctggagtgcgatggagctgatagaatcaaggaacaggacatggactccgtgaggagcaagctgtataagctgatcgatttttgcattttcaaatactaccacgagttccctgagctgagcgagaagaacgtcgacatcctcagggctgccgtgagcgataccaaaaaggacaacctgtatagcgacgaggccgctaggctctggagcatcttcaaggaaaagttcctgggcttctgcgacaagattgtggtgtgggtgaccggcgagcacgagaaagacatcacctccgtgattgacaaggacgcttacaggaacaggtccaacgtgagctacttttccaagctgatgtacgccatgtgtttcttcctggatggaaaggaaattaacgatctgctgaccacactgatcaacaaattcgacaacattgccaaccagatcaagaccgccaaggagctcggcattaacaccgccttcgtgaaaaactacgattttttcaaccacagcgaaaagtacgtggacgagctgaacattgtgaaaaacatcgccaggatgaaaaagccctccagcaacgccaagaaggccatgtaccatgacgccctgacaatcctgggcatccccgaggatatggacgagaaggccctggatgaggagctcgatctcatcctggaaaagaagaccgatcccgtgaccggaaagcccctcaaaggcaaaaatcccctgaggaattttatcgctaataatgtgattgagaatagcaggttcatttacctgattaaattttgcaaccctgagaatgtcaggaaaatcgtgaacaacacaaaggtgaccgagttcgtgctcaagaggatccccgatgcccagatcgagaggtactacaagagctgtaccgattccgagatgaaccctcccacagaaaagaagatcaccgagctggccggcaagctgaaagatatgaattttggaaacttcaggaacgtgaggcagtccgccaaggaaaacatggagaaagagaggttcaaggccgtcattggcctgtacctcaccgtcgtctacagagtggtcaaaaacctggtggacgtcaatagcaggtacatcatggccttccatagcctggagagagattcccagctgtacaacgtgagcgtcgataatgattacctggccctcaccgacaccctggtcaaggagggcgacaacagcaggtccaggtacctggccggaaataaaaggctgagggattgcgtgaagcaagacatcgacaatgccaaaaagtggttcgtctccgacaagtacaactccattacaaagtacgcgaacaacgtggccgccctgaccgccgtgagaaactgcgccgagttcatcggcgacattaccaagatcgactcctacttcgccctctaccactacctcattcagagacagctggctaagggcctcgatcatgagaggtccggattcgacaggaattacccccagtacgcccctctgttcaaatggcacacctacgtgaaggatgtcgtcaaggccctgaacgcccccttcggatacaatatccctaggttcaagaatctgagcatcgacgccctctttgataggaatgaaatcaagaagaacgatggcgagaagaagtccgacgactga

SEQ ID NO: 124 - DNA, 2757 bp, Artificial Sequence
  Ruminococcus bicirculans nCas1 sequence
atggcaaaaaagaataaaatgaagcctagagagctgcgtgaggctcagaaaaaagccagacagctcaaagcggctgagataaataataacgctgttcctgcaatcgctgccatgcctgctgcagaggctgctgcacctgcggcagagaagaaaaaatcctccgtaaaggcggcaggaatgaagtctattcttgtcagtgaaaataaaatgtacataacctctttcggcaagggcaattctgcggtgcttgaatatgaggtggataataatgactacaacaaaactcagctttcctcaaaggacaacagtaatatcgagctctgtgatgtaggcaaagtaaacatcactttttcgagcagacgtggctttgagagcggtgtggagataaacacttcaaaccctactcacagaagcggtgaaagctcgtctgtaagaggggatatgctggggcttaaatcggagcttgaaaagcgctttttcggcaagaattttgatgataatatacatatccagcttatttacaacattctggatatcgaaaagatacttgcagtgtatgtgacgaatatcgtttatgcactgaacaatatgcttggggaaggcgatgagagcaattacgatttcatggggtatctttccacatttaacacttataaagtttttactaatcctaatggcagcactttatccgacgataagaaagagaatatcagaaaaagtcttagcaaattcaatgccctgctgaaaactaagcgtcttggctatttcggccttgaagagccaaagacaaaggatacaagagcttcggaagcatacaaaaagcgtgtttatcatatgcttgcaattgtggggcagataagacagtgtgtttttcatgataaatcgggtgcaaaaagatttgacctttacagttttattaacaatattgatcccgaatacagagaaacccttgactatcttgtagatgagagatttgattctataaataagggctttatccagggcaacaaggtcaatatcagcttgcttattgatatgatgaaaggctatgaggctgatgatatcatacgcctttattacgatttcattgtgcttaaatctcagaaaaatctcggtttttctatcaaaaagcttcgtgagaaaatgctggacgaatacggcttcagatttaaggacaagcaatatgactctgtgcgctcaaagatgtacaagcttatggattttctgcttttctgcaactactacagaaatgacattgccgcaggcgaatctcttgtgcgcaaactgcgtttttcaatgaccgatgatgaaaaagaggggatatatgctgatgaagcggcaaagctttggggcaaattcaggaatgattttgaaaatatcgccgaccacatgaacggtgacgttatcaaggagcttggcaaggctgacatggattttgatgagaaaattcttgacagcgaaaagaagaatgcgtctgaccttttgtatttctccaaaatgatatatatgctcacatattttcttgacggcaaggagataaacgaccttcttacaacgcttatcagcaagtttgataacatcaaggagtttttgaagataatgaaaagctctgctgttgatgttgagtgtgaacttacggcgggctacaagctgttcaatgacagccagaggataaccaacgagctttttatcgtaaagaacattgcttccatgagaaagcctgcggcttcggcgaagcttacgatgttccgtgacgcactgactatactcggtatagacgacaagatcacggacgataggataagcgagattctaaaacttaaagaaaaaggcaagggcatacatggcctgagaaatttcataacaaacaatgttatcgagtcctctcggtttgtataccttatcaagtatgcgaacgctcagaagataagagaagtggctaagaatgagaaagttgtcatgtttgttcttgggggtatccctgacacgcagatagagcgttattacaagagttgtgtggaatttcctgacatgaacagttctttgggagtaaagcgcagtgagcttgcgagaatgataaagaacatcagctttgatgatttcaaaaatgtgaaacagcaggcaaagggcagagaaaacgtggctaaggagagggcaaaggctgttatcgggctttatcttacggtcatgtatctgctggtgaaaaatcttgtgaatgtcaatgcaaggtatgttattgcgatacactgccttgaacgtgattttgggctgtataaggagataattcctgagttggcttcaaagaacttgaaaaatgactacaggatactttcacagacgctttgtgaactttgtgataagtcgccgaatttgttcttgaaaaagaacgagcggctgcgcaagtgcgttgaagttgatatcaataatgcagacagcagcatgacaagaaaataccgcaactgtattgctcatcttactgtagttcgtgaactgaaagaatacataggagatatttgtacagtggattcttacttctccatttatcattatgttatgcagcgctgtatcacgaaaagggaaaatgacacaaagcaagaagagaaaataaagtatgaggacgatcttttaaaaaatcacggctatacgaaagactttgtaaaggctctcaactcgccgtttggatacaacattccgaggtttaaaaatctttcaattgagcagttgtttgacagaaatgaatatcttactgaaaagtag

SEQ ID NO: 125 - DNA, 2865 bp, Artificial Sequence
  Eubacterium siraeum nCas1 sequence
atgggtaagaaaatacacgcacgagatctcagagaacaaagaaagaccgatagaacggaaaaatttgcagatcagaacaaaaaacgtgaagcagagagggcagttccgaaaaaagacgcagccgtttctgtaaaatcagtttcttctgtttcatcaaaaaaagacaatgtaacaaaatctatggctaaagccgcaggcgtgaagtcggtttttgctgtaggaaatactgtttatatgacttcattcggcagaggaaacgatgctgtacttgagcagaaaatagtcgatacatcgcacgaaccgctgaatattgacgatcctgcatatcagttgaacgttgtcacaatgaacggttattcggttaccggtcacagaggtgaaacggtatctgccgtaacggataatccgctgcgccgttttaacggaagaaagaaagatgaaccggaacagtctgtgcctacggatatgctgtgcctgaaaccgactcttgaaaagaaattcttcggcaaagaattcgatgataatatacatatccagcttatttacaatattcttgacattgaaaaaatactggcggtttattcgaccaacgctatttacgcattgaataatatgagtgctgacgaaaatatcgaaaacagcgatttcttcatgaaacgtaccaccgatgaaacctttgacgattttgaaaagaaaaaggagagtacaaacagtcgagagaaagccgattttgacgcatttgaaaaattcatcggcaattacaggctggcttattttgccgatgcattttatgtaaataaaaagaatcccaaaggtaaagcaaaaaatgttctgcgtgaggataaagaactttactccgtgctcactctgatcggtaaactgcgtcattggtgtgttcacagtgaggagggcagagcagaattctggctgtataagctcgatgaacttaaagatgatttcaaaaatgtactcgacgttgtttataaccgtcctgttgaagaaataaacaaccgctttatagaaaacaataaggtaaacatacagatactgggctcggtatacaagaacaccgatattgccgaacttgtaaggtcatattacgaatttcttatcacaaagaagtataaaaatatgggcttttcaataaagaagctccgtgagagtatgctcgaaggtaaaggttacgccgataaagaatatgattctgtaaggaataagctgtatcagatgacggatttcatcttatacacaggatatatcaacgaagacagcgatagagccgacgatcttgtgaacactttgagaagttcgctcaaagaggatgataagacaaccgtatattgcaaggaagcggattatctgtggaaaaaataccgtgaatccataagagaggttgccgatgcgcttgatggcgataacattaaaaagctgagcaaatcgaatattgaaattcaggaagacaagctgagaaaatgttttatcagctatgccgacagcgtatcggaatttaccaagcttatttatctgctgacaagatttttaagcggtaaggagatcaacgatcttgtcacaacgctgataaacaagtttgacaatatcagaagcttccttgaaataatggacgagcttgggcttgacaggaccttcaccgccgagtacagcttctttgaaggcagtacaaagtatcttgccgagcttgtcgagcttaacagctttgtgaaatcgtgttcgtttgatataaacgcaaaaagaacaatgtatcgcgatgcgctggatattctcggcattgaatcggataagaccgaagaagatattgagaagatgatcgataatatccttcagatcgacgcaaacggtgataaaaagctcaagaaaaacaacggtctgagaaatttcattgcaagtaacgttatagattcaaaccgattcaagtaccttgtgcggtacggaaatccaaagaagattcgtgaaacggcaaaatgcaagcccgctgtaaggtttgtgctgaatgagatcccggacgcacagatcgaaagatattatgaggcttgttgcccaaaaaatacagctttatgctctgcaaataagagacgtgagaaactggctgatatgatagctgaaataaagtttgagaatttttcggatgccggcaattatcagaaagcaaatgtcacatcaagaacgtctgaagctgaaatcaagcggaagaatcaggctataatccgtctttatcttaccgttatgtacattatgctgaagaaccttgtaaatgtgaacgccagatacgttatcgctttccattgcgttgaaagggatacgaagctgtatgcggaaagcggtctggaagtcggtaatatagaaaaaaacaagacaaatcttactatggctgtaatgggagtcaagctcgaaaacggaatcataaaaacggaatttgacaagagctttgcagaaaatgccgcaaacagatatctcaggaatgcacgctggtacaagctgatactggataatttaaagaagtcggaaagagcggttgtcaatgagttcagaaatactgtctgccatctgaatgcgataaggaatatcaatatcaatatcaaggaaataaaagaggtcgagaactactttgctctgtaccactacctcattcagaaacatctcgaaaatcgttttgccgataaaaaagtagaaagagacaccggcgattttataagcaagctcgaagaacacaagacttactgcaaggactttgtaaaagcatattgtacgcctttcggatataaccttgtgagatataaaaaccttacgatagacgggctgtttgataagaattaccccggaaaagacgattctgatgaacagaaataa

SEQ ID NO: 126 - DNA, 2799 bp, Artificial Sequence
  Ruminococcus flavefaciens FD1 nCas1 sequence
atgaaaaagaaaatgtctctccgtgaaaagcgtgaagccgagaaacaggctaaaaaagctgcatattcagcagcttcaaaaaatacagattctaagcctgcggaaaagaaagcagaaactccaaagcctgcggagattatttccgataattccagaaataagaccgctgtaaaggcggctggtctgaaatcaacaattatcagcggcgataagctgtatatgacatctttcggcaagggtaacgctgctgttattgagcagaaaatagatatcaatgattattctttttcagctatgaaagatactccgtcgcttgaagttgataaagcagaatcaaaagagatctctttttcaagtcaccatccttttgtaaagaatgataagctgacaacatataaccctttatacggcggcaaggataaccccgaaaagcctgtcggcagggatatgctcggcttaaaagataagcttgaagaacgctatttcggatgtacattcaatgataatcttcacatccagattatctataacatacttgacatcgagaagattttagctgttcattctgcaaatatcacaactgcgcttgaccacatggttgatgaagacgatgaaaaatatcttaacagcgattatatcggctacatgaataccataaatacatatgacgtgtttatggatccttcaaagaattcttcattaagccctaaagatagaaagaatattgacaacagccgtgcaaaatttgagaaactgctttcaactaagcgccttggctattttggatttgactatgatgcaaacggtaaggacaagaaaaagaacgaggaaataaaaaagcgtttatatcatctcacagcttttgcaggtcagctccgtcagtggagttttcatagtgctggcaattatccgagaacatggctttacaagctcgattcactggataaggaatatcttgatactcttgaccattacttcgataaacgttttaacgatataaacgatgatttcgtaactaagaatgctaccaatctctatattctgaaagaagtatttcccgaagcaaacttcaaggatattgccgatctttattacgatttcatagttataaagtcgcacaaaaatatgggattctccataaaaaagctgagggagaagatgcttgaatgtgatggtgcagacaggataaaagaacaggatatggactctgttcgctcaaagctgtataagctcatagacttttgcattttcaagtattatcacgaatttcctgaacttagtgaaaagaatgtggatatactcagagcggctgtatccgatacaaaaaaagataacctttattctgatgaggctgcacgtttatggagcatatttaaagaaaaattcctcggcttctgtgataagatagttgtatgggtaacaggagagcatgagaaagatatcacatccgttattgataaggatgcttacaggaacaggagcaatgtttcatatttctcaaagctgatgtatgcaatgtgctttttccttgacggaaaagagataaatgaccttctcactactcttatcaacaaattcgataatatcgctaaccagataaaaacagccaaagaacttggcattaatactgcttttgtaaagaattacgatttcttcaatcacagcgagaaatatgtcgatgaactgaacatcgtcaagaatattgcaagaatgaagaagccttcaagtaatgccaaaaaagctatgtatcatgatgcgcttactattctcggaatacctgaggatatggatgaaaaagctcttgatgaggaactggatttaattcttgaaaaaaagacagacccagtaactggcaagccactgaaaggtaagaatcctttacgtaattttatcgcaaacaatgtgatagagaattcaagattcatatatcttatcaagttctgcaatcctgagaatgtacgtaaaatcgtgaataatacaaaggtcactgagtttgtgttaaagcgtattcccgatgctcagatcgaacgctattataagtcgtgtacagattctgaaatgaatccgcctactgaaaagaagatcaccgaacttgctggtaagttaaaggatatgaactttggcaacttccgaaatgtgagacagtctgctaaagagaatatggagaaggagcgcttcaaagctgttatagggctttatctcacggtagtatatcgtgttgtcaagaatcttgttgatgtaaactcacgatatatcatggcttttcattcgcttgaacgtgattcacaactgtataacgtatctgttgataatgattatcttgcacttaccgatactcttgttaaggagggagataattccagaagcagatatcttgcaggcaacaagcgtctgagagattgtgtgaagcaggatatcgataatgcaaaaaagtggtttgttagtgataagtacaatagcataaccaagtacaggaataacgttgcccatcttaccgctgtacgtaactgcgctgaattcatcggagatataacgaagatagactcctattttgcattgtatcattatctcattcagagacagcttgcgaaaggtcttgaccatgagcgaagtggctttgacagaaactatccacagtatgcaccgctgtttaagtggcatacgtatgtaaaggatgttgtcaaggctctgaatgctccatttggctacaatatccctcgtttcaagaatctcagcatagatgcactttttgaccgcaacgaaataaagaagaatgacggcgagaaaaaatccgatgat

SEQ ID NO: 127 - DNA, 2835 bp, Artificial Sequence
  Ruminococcus albus nCas1 sequence
atggcaaaaaaatcgaaaggtatgagccttagagaaaaacgtgaacttgaaaagcagaaaaggatacaaaaggcagctgtgaattcagttaatgatacacctgaaaaaacagaagaagcaaatgtcgtatctgtaaatgtcaggacatcggctgagaataagcatagtaaaaaatctgctgccaaagctttgggactgaaatccgggctggttatcggtgatgagctgtaccttacttcattcggcagaggtaacgaagcaaagcttgaaaagaagatatccggtgacactgtcgaaaaacttggcattggtgcttttgaagtcgccgaacgtgacgaatcaacgcttaccctcgaaagtggcaggataaaggacaagaccgccagacccaaagaccccagacatataaccgtcgatacacaaggtaaattcaaggaagatatgcttgggatacgcagtgtactggagaaaaagatatttggcaaaacatttgatgataatatccatgttcagcttgcgtacaatatcctggatgtcgaaaagataatggcacagtatgtcagcgatatcgtatatatgctgcataatactgataaaacagaaagaaacgataatcttatggggtatatgagcatcaggaatacctataagacattttgtgatacgtcaaatcttcccgatgatacaaaacaaaaagttgaaaatcagaagagagagtttgacaagatcataaaaagcggcagacttgggtatttcggcgaagcttttatggtaaacagcggcaatagtaccaagcttagacccgagaaagagatatatcatatctttgcgcttatggcgagcctgaggcagagttactttcacggatatgtaaaagataccgattatcagggaaccacatgggcatatactcttgaggacaagctgaaaggtccgagccatgagttcagggaaaccattgataagatatttgatgagggattcagcaagatcagcaaggactttggcaagatgaacaaggtcaaccttcagatacttgaacagatgattggtgaactgtatggcagtatagaacgacaaaacctcacttgcgattactatgacttcattcaactgaaaaagcataagtatcttggattttctataaagcgtcttagagagaccatgcttgaaacaacaccggctgaatgttataaagctgaatgctataacagcgagcgtcaaaagctgtataagctgatagatttcctgatatatgatctttactataaccgtaagcctgcacgcatcgaagaaatcgtggacaagctgagggaatctgtgaacgacgaagagaaagaatccatatattcagttgaggcgaagtatgtctatgaatcacttagcaaagttctggataaatcgctgaaaaacagtgtgtctggtgaaacgataaaggatctccaaaagagatatgatgacgaaacagcaaacaggatctgggatatctcacagcacagtataagtggaaatgtcaactgtttctgcaagctaatttatattatgaccctgatgcttgacggcaaggagataaatgatctgctgacaacgctggtaaacaagttcgataacatagcatcatttatagatgttatggacgaacttggcttggagcatagttttacagataactataaaatgtttgccgacagcaaggctatatgccttgatctgcagttcataaacagttttgcacgtatgtcaaagatcgatgatgagaagtcaaaaagacagcttttccgtgatgcgcttgtcatactggatatcggtaataaagatgagacttggataaataattatctggattctgatattttcaaactggacaaagaaggtaacaagttaaagggcgcaaggcatgatttcaggaactttatagccaataatgttataaagtcatcacgtttcaaatacctagtaaaatacagcagtgccgatggtatgataaagctgaaaacgaatgaaaagctgataggctttgttctggataagcttccagaaacgcagatagaccgctactatgaatcatgcggacttgacaatgcggtagtagataagaaagtcaggatagaaaagctatcggggcttatcagagatatgaagttcgatgatttcagcggtgtcaaaacctcaaacaaagcaggagataatgacaaacaggataaggcgaaatatcaggcgataataagcctgtacctcatggtgctgtatcagatagtcaagaacatgatatatgtcaactcacgttatgttatcgctttccattgtcttgaacgtgactttggtatgtatggaaaagattttggaaagtattatcaaggctgccgaaaacttacagatcattttattgaagaaaagtacatgaaagagggtaaacttggctgcaataaaaaagtcggcagatatctgaaaaataatatttcctgctgcactgatggactgataaatacctaccgtaatcaggttgatcactttgcagtggtaaggaagataggcaactatgcggcatatatcaagagtatcggttcgtggtttgaactttatcactatgtaatacagaggatagtttttgacgaatacagatttgcacttaacaacactgaaagcaactataagaacagcatcatcaagcaccatacctactgtaaggatatggtcaaggcactgaacacacctttcggttatgacctgccgagatacaagaatctttctatcggtgatctgtttgatcgcaataattatctgaataaaacaaaagagtcaatagatgcaaatagctctattgacagtcagtga

SEQ ID NO: 128 - DNA, 2904 bp, Artificial Sequence
  Ruminococcus flavefaciens XPD nCas1 sequence
atgatcgaaaagaagaagtcatttgcaaagggcatgggagtaaaatcaacacttgtatccggttcaaaggtatacatgacgacgttcgcagaaggaagcgatgccagacttgaaaagatcgttgaaggcgattctatcagatctgtcaacgaaggagaagcgttctcagctgaaatggctgataagaatgcaggctacaagatcggtaacgcaaagttcagccacccaaagggctatgctgtagttgcaaacaaccccttatacaccggaccggtacagcaggatatgctcggtctgaaggaaacgcttgaaaagagatattttggagagtctgccgacggaaatgataatatctgtattcaggtcatccataatatcctcgatatcgaaaagatcctcgctgaatatataaccaatgctgcttatgcggtaaacaatatttccggtcttgataaggatatcatcggttttggtaagttcagtacggtctatacttatgatgagttcaaggatcctgaacatcacagagcagctttcaacaataacgataagttaattaatgccatcaaggcacagtatgatgaatttgacaatttccttgataatcctcgtctcggctactttggacaggcttttttcagtaaggaaggcagaaattacattatcaattacggcaacgagtgttatgatattcttgctttactcagcggattgcgtcactgggtagtacataataatgaggaagaatcaaggatttcccgtacatggctttataatctcgacaagaatcttgacaacgaatatatctctactctcaattatctgtatgatagaattacaaacgaattaacaaattccttctcaaagaatagtgcagccaacgtaaactatatcgctgaaacccttggtattaatcctgctgaatttgcagagcagtatttcagattcagtatcatgaaggaacagaagaatctcggtttcaatattactaagctgagagaagtaatgcttgacagaaaggatatgtctgagatccgtaaaaatcataaggtctttgattcaatccgtactaaggtctatactatgatggatttcgttatctacagatattacattgaagaggatgcaaaggttgctgctgccaacaagtctctgccggataacgaaaaaagcctcagtgaaaaggatatctttgttataaatctcagaggaagctttaacgatgatcagaaggatgccctttattatgatgaggccaatcgtatttggagaaagctcgaaaacattatgcacaatatcaaggaattcagaggcaataagacacgtgaatacaagaagaaggatgctccaagactccccagaattcttcctgccggaagggatgtttccgcgttctcaaagttgatgtacgctcttaccatgttccttgatggtaaggagatcaatgatcttctcaccacgctcatcaataagttcgataacatccagagtttcctcaaggtaatgcctcttatcggagtgaatgcaaagtttgttgaggaatatgccttcttcaaggacagcgcaaagattgctgacgaactcaggctgattaagagctttgccagaatgggagaacctatcgcagatgcaagacgtgctatgtatatcgatgctatcaggattctcggaacaaacctcagctatgatgagcttaaggcccttgccgatactttttcgcttgatgaaaacggcaacaagcttaagaagggcaagcacggcatgagaaacttcatcattaataatgtaatcagtaacaagcgcttccattatctcattcgttacggtgatcctgcacatctccatgagatcgccaagaatgaagctgttgtaaagttcgtcctcggcaggatagctgatatccagaagaagcagggacagaacggaaagaatcagatcgacaggtactatgagacctgtatcggcaaggacaagggcaagtctgtctccgaaaaggttgatgccctcacaaagattatcaccggtatgaactacgatcagttcgataagaagagaagcgttattgaggatactggaagagaaaacgctgagagagaaaagttcaagaagatcatcagcctctatcttactgtcatttatcacatccttaagaatattgttaatatcaatgcgcgttacgttatcggcttccattgcgttgagcgtgatgcacagctctataaggaaaagggctatgatatcaacctcaagaagctcgaagaaaaggggttttcatcagtcacaaagctgtgtgcaggtattgatgagactgctcctgacaagcgtaaggatgttgaaaaggaaatggctgagcgtgcaaaggaatctatcgatagccttgaatctgcaaatcctaagctttacgcaaactatatcaagtattctgacgagaagaaggctgaggaatttactagacagatcaaccgtgagaaggcaaagaccgctctgaatgcatatctcagaaatactaagtggaatgtgataatcagggaagatcttcttagaatcgataataagacatgtacgctctttagaaataaggccgttcatcttgaagttgcaagatatgttcatgcatatatcaacgatattgccgaagtaaacagctatttccagctttatcattacatcatgcagagaatcatcatgaacgaaagatatgaaaagtcttctggaaaggtaagcgaatacttcgatgctgtgaacgatgaaaagaagtacaacgacaggcttctgaagctgttgtgcgttccatttggttactgcatcccgagattcaagaatctctccattgaagctttgttcgacaggaacgaagcagctaagtttgacaaggaaaagaagaaagtatcaggtaattcatag

SEQ ID NO: 129 - DNA, 36 bp, Artificial Sequence
  Consensus DR
gaactacacccgtgcaaaaatgcaggggtctaaaac

SEQ ID NO: 130 - DNA, 36 bp, Artificial Sequence
  Consensus DR
ctactacactggtgcaaatttgcactagtctaaaac

SEQ ID NO: 131 - DNA, 36 bp, Artificial Sequence
  Consensus DR
caaguaaaccccuaccaacuggucgggguuugaaac

SEQ ID NO: 132 - DNA, 36 bp, Artificial Sequence
  Consensus DR
cuacuacacuggugcgaauuugcacuagucuaaaac

SEQ ID NO: 133 - DNA, 36 bp, Artificial Sequence
  Consensus DR
gaacuauaguagugugaauuuacacuacucuaaaac

SEQ ID NO: 134 - DNA, 36 bp, Artificial Sequence
  Consensus DR
cuacuauacuagugugauuuuacacuagucuaaaac

SEQ ID NO: 135 - DNA, 36 bp, Artificial Sequence
  Consensus DR
gaccaacaccucugcaaaacugcaggggucuaaaac

SEQ ID NO: 136 - DNA, 36 bp, Artificial Sequence
  Consensus DR
gcacuacaccccccugaaacaugaggggucuaaaac

SEQ ID NO: 137 - DNA, 36 bp, Artificial Sequence
  Consensus DR
gcactacacccccctgaaacatgaggggtctaaaac

SEQ ID NO: 138 - protein, 966 aa, Artificial Sequence
  50% consensus sequence for 7 full-length nCas1 orthologues
  misc_feature (2)..(4): Xaa can be any naturally occurring amino acid
  misc_feature (13)..(13): Xaa can be any naturally occurring amino acid
  misc_feature (22)..(23): Xaa can be any naturally occurring amino acid
  misc_feature (25)..(25): Xaa can be any naturally occurring amino acid
  misc_feature (32)..(33): Xaa can be any naturally occurring amino acid
  misc_feature (39)..(40): Xaa can be any naturally occurring amino acid
  misc_feature (43)..(44): Xaa can be any naturally occurring amino acid
  misc_feature (46)..(56): Xaa can be any naturally occurring amino acid
  misc_feature (60)..(60): Xaa can be any naturally occurring amino acid
  misc_feature (69)..(70): Xaa can be any naturally occurring amino acid
  misc_feature (72)..(72): Xaa can be any naturally occurring amino acid
  misc_feature (74)..(76): Xaa can be any naturally occurring amino acid
  misc_feature (83)..(83): Xaa can be any naturally occurring amino acid
  misc_feature (86)..(86): Xaa can be any naturally occurring amino acid
  misc_feature (88)..(88): Xaa can be any naturally occurring amino acid
  misc_feature (94)..(95): Xaa can be any naturally occurring amino acid
  misc_feature (97)..(108): Xaa can be any naturally occurring amino acid
  misc_feature (110)..(135): Xaa can be any naturally occurring amino acid
  misc_feature (139)..(147): Xaa can be any naturally occurring amino acid
  misc_feature (149)..(150): Xaa can be any naturally occurring amino acid
  misc_feature (157)..(158): Xaa can be any naturally occurring amino acid
  misc_feature (162)..(162): Xaa can be any naturally occurring amino acid
  misc_feature (167)..(167): Xaa can be any naturally occurring amino acid
  misc_feature (191)..(192): Xaa can be any naturally occurring amino acid
  misc_feature (201)..(209): Xaa can be any naturally occurring amino acid
  misc_feature (211)..(211): Xaa can be any naturally occurring amino acid
  misc_feature (213)..(214): Xaa can be any naturally occurring amino acid
  misc_feature (216)..(217): Xaa can be any naturally occurring amino acid
  misc_feature (220)..(221): Xaa can be any naturally occurring amino acid
  misc_feature (225)..(225): Xaa can be any naturally occurring amino acid
  misc_feature (227)..(228): Xaa can be any naturally occurring amino acid
  misc_feature (230)..(242): Xaa can be any naturally occurring amino acid
  misc_feature (244)..(249): Xaa can be any naturally occurring amino acid
  misc_feature (251)..(251): Xaa can be any naturally occurring amino acid
  misc_feature (253)..(257): Xaa can be any naturally occurring amino acid
  misc_feature (264)..(264): Xaa can be any naturally occurring amino acid
  misc_feature (267)..(270): Xaa can be any naturally occurring amino acid
  misc_feature (273)..(280): Xaa can be any naturally occurring amino acid
  misc_feature (283)..(283): Xaa can be any naturally occurring amino acid
  misc_feature (285)..(285): Xaa can be any naturally occurring amino acid
  misc_feature (290)..(292): Xaa can be any naturally occurring amino acid
  misc_feature (296)..(298): Xaa can be any naturally occurring amino acid
  misc_feature (300)..(310): Xaa can be any naturally occurring amino acid
  misc_feature (314)..(314): Xaa can be any naturally occurring amino acid
  misc_feature (316)..(318): Xaa can be any naturally occurring amino acid
  misc_feature (320)..(321): Xaa can be any naturally occurring amino acid
  misc_feature (323)..(325): Xaa can be any naturally occurring amino acid
  misc_feature (329)..(331): Xaa can be any naturally occurring amino acid
  misc_feature (333)..(337): Xaa can be any naturally occurring amino acid
  misc_feature (340)..(341): Xaa can be any naturally occurring amino acid
  misc_feature (343)..(345): Xaa can be any naturally occurring amino acid
  MISC_FEATURE (350)..(350): Xaa can be Ile or Leu
  misc_feature (351)..(352): Xaa can be any naturally occurring amino acid
  misc_feature (354)..(357): Xaa can be any naturally occurring amino acid
  misc_feature (359)..(364): Xaa can be any naturally occurring amino acid
  MISC_FEATURE (365)..(365): Xaa can be Ile or Leu
  misc_feature (366)..(368): Xaa can be any naturally occurring amino acid
  misc_feature (373)..(375): Xaa can be any naturally occurring amino acid
  misc_feature (377)..(378): Xaa can be any naturally occurring amino acid
  misc_feature (391)..(391): Xaa can be any naturally occurring amino acid
  misc_feature (394)..(397): Xaa can be any naturally occurring amino acid
  misc_feature (399)..(400): Xaa can be any naturally occurring amino acid
  MISC_FEATURE (401)..(401): Xaa can be Ile or Leu
  misc_feature (402)..(404): Xaa can be any naturally occurring amino acid
  misc_feature (411)..(411): Xaa can be any naturally occurring amino acid
  misc_feature (415)..(415): Xaa can be any naturally occurring amino acid
  misc_feature (417)..(417): Xaa can be any naturally occurring amino acid
  MISC_FEATURE (420)..(420): Xaa can be Ile or Leu
  misc_feature (423)..(424): Xaa can be any naturally occurring amino acid
  misc_feature (426)..(427): Xaa can be any naturally occurring amino acid
  misc_feature (429)..(433): Xaa can be any naturally occurring amino acid
  misc_feature (435)..(436): Xaa can be any naturally occurring amino acid
  misc_feature (438)..(439): Xaa can be any naturally occurring amino acid
  misc_feature (442)..(442): Xaa can be any naturally occurring amino acid
  misc_feature (444)..(445): Xaa can be any naturally occurring amino acid
  misc_feature (447)..(447): Xaa can be any naturally occurring amino acid
  misc_feature (450)..(452): Xaa can be any naturally occurring amino acid
  misc_feature (454)..(455): Xaa can be any naturally occurring amino acid
  misc_feature (458)..(459): Xaa can be any naturally occurring amino acid
  misc_feature (462)..(477): Xaa can be any naturally occurring amino acid
  misc_feature (479)..(480): Xaa can be any naturally occurring amino acid
  MISC_FEATURE (481)..(481): Xaa can be Ile or Leu
  misc_feature (483)..(485): Xaa can be any naturally occurring amino acid
  misc_feature (487)..(487): Xaa can be any naturally occurring amino acid
  misc_feature (489)..(489): Xaa can be any naturally occurring amino acid
  misc_feature (491)..(506): Xaa can be any naturally occurring amino acid
  misc_feature (509)..(510): Xaa can be any naturally occurring amino acid
  misc_feature (517)..(517): Xaa can be any naturally occurring amino acid
  misc_feature (520)..(520): Xaa can be any naturally occurring amino acid
  misc_feature (542)..(542): Xaa can be any naturally occurring amino acid
  misc_feature (546)..(546): Xaa can be any naturally occurring amino acid
  misc_feature (549)..(549): Xaa can be any naturally occurring amino acid
  misc_feature (554)..(556): Xaa can be any naturally occurring amino acid
  misc_feature (558)..(560): Xaa can be any naturally occurring amino acid
  misc_feature (562)..(563): Xaa can be any naturally occurring amino acid
  misc_feature (565)..(566): Xaa can be any naturally occurring amino acid
  misc_feature (568)..(569): Xaa can be any naturally occurring amino acid
  misc_feature (571)..(572): Xaa can be any naturally occurring amino acid
  misc_feature (575)..(577): Xaa can be any naturally occurring amino acid
  misc_feature (580)..(580): Xaa can be any naturally occurring amino acid
  misc_feature (584)..(584): Xaa can be any naturally occurring amino acid
  misc_feature (587)..(589): Xaa can be any naturally occurring amino acid
  misc_feature (593)..(593): Xaa can be any naturally occurring amino acid
  misc_feature (600)..(600): Xaa can be any naturally occurring amino acid
  misc_feature (605)..(612): Xaa can be any naturally occurring amino acid
  misc_feature (614)..(616): Xaa can be any naturally occurring amino acid
  misc_feature (618)..(623): Xaa can be any naturally occurring amino acid
  MISC_FEATURE (624)..(624): Xaa can be Ile or Leu
  misc_feature (626)..(629): Xaa can be any naturally occurring amino acid
  misc_feature (631)..(632): Xaa can be any naturally occurring amino acid
  misc_feature (634)..(636): Xaa can be any naturally occurring amino acid
  misc_feature (648)..(648): Xaa can be any naturally occurring amino acid
  misc_feature (650)..(650): Xaa can be any naturally occurring amino acid
  misc_feature (653)..(653): Xaa can be any naturally occurring amino acid
  misc_feature (656)..(656): Xaa can be any naturally occurring amino acid
  misc_feature (659)..(659): Xaa can be any naturally occurring amino acid
  misc_feature (662)..(664): Xaa can be any naturally occurring amino acid
  misc_feature (666)..(666): Xaa can be any naturally occurring amino acid
  MISC_FEATURE (667)..(667): Xaa can be Ile or Leu
  misc_feature (669)..(669): Xaa can be any naturally occurring amino acid
  misc_feature (673)..(675): Xaa can be any naturally occurring amino acid
  misc_feature (679)..(680): Xaa can be any naturally occurring amino acid
  misc_feature (684)..(684): Xaa can be any naturally occurring amino acid
  misc_feature (694)..(696): Xaa can be any naturally occurring amino acid
  misc_feature (698)..(706): Xaa can be any naturally occurring amino acid
  misc_feature (708)..(709): Xaa can be any naturally occurring amino acid
  misc_feature (711)..(713): Xaa can be any naturally occurring amino acid
  misc_feature (715)..(718): Xaa can be any naturally occurring amino acid
  misc_feature (720)..(720): Xaa can be any naturally occurring amino acid
  misc_feature (723)..(723): Xaa can be any naturally occurring amino acid
  misc_feature (726)..(726): Xaa can be any naturally occurring amino acid
  misc_feature (728)..(733): Xaa can be any naturally occurring amino acid
  misc_feature (735)..(738): Xaa can be any naturally occurring amino acid
  misc_feature (742)..(742): Xaa can be any naturally occurring amino acid
  misc_feature (745)..(745): Xaa can be any naturally occurring amino acid
  misc_feature (753)..(753): Xaa can be any naturally occurring amino acid
  misc_feature (755)..(756): Xaa can be any naturally occurring amino acid
  misc_feature (778)..(779): Xaa can be any naturally occurring amino acid
  misc_feature (782)..(797): Xaa can be any naturally occurring amino acid
  misc_feature (800)..(812): Xaa can be any naturally occurring amino acid
  misc_feature (816)..(852): Xaa can be any naturally occurring amino acid
  misc_feature (856)..(856): Xaa can be any naturally occurring amino acid
  misc_feature (858)..(858): Xaa can be any naturally occurring amino acid
  misc_feature (861)..(861): Xaa can be any naturally occurring amino acid
  misc_feature (863)..(863): Xaa can be any naturally occurring amino acid
  misc_feature (865)..(865): Xaa can be any naturally occurring amino acid
  MISC_FEATURE (866)..(866): Xaa can be Ile or Leu
  misc_feature (867)..(868): Xaa can be any naturally occurring amino acid
  misc_feature (871)..(871): Xaa can be any naturally occurring amino acid
  misc_feature (874)..(875): Xaa can be any naturally occurring amino acid
  misc_feature (877)..(877): Xaa can be any naturally occurring amino acid
  misc_feature (886)..(887): Xaa can be any naturally occurring amino acid
  misc_feature (890)..(890): Xaa can be any naturally occurring amino acid
  misc_feature (892)..(897): Xaa can be any naturally occurring amino acid
  misc_feature (899)..(912): Xaa can be any naturally occurring amino acid
  misc_feature (914)..(914): Xaa can be any naturally occurring amino acid
  misc_feature (917)..(917): Xaa can be any naturally occurring amino acid
  misc_feature (920)..(920): Xaa can be any naturally occurring amino acid
  misc_feature (926)..(926): Xaa can be any naturally occurring amino acid
  MISC_FEATURE (932)..(932): Xaa can be Ile or Leu
  misc_feature (941)..(942): Xaa can be any naturally occurring amino acid
  misc_feature (949)..(954): Xaa can be any naturally occurring amino acid
  misc_feature (956)..(957): Xaa can be any naturally occurring amino acid
  misc_feature (959)..(963): Xaa can be any naturally occurring amino acid
MXXXKKKMSLREXREAEKQARXXKXAAASKNXXAVPAKXXAAXXPXXXXXXXXXXXKKSXAKAAGLKSXXVXGXXXYMTSFGXGNXAXLEKKIXXBXXXXXXXXXXXXEXXXXXXXXXXXXXXXXXXXXXXXXXXNPLXXXXXXXXXVXXDMLGLKXXLEKXYFGKXFDDNIHIQLIYNILDIEKILAVYXXNIVYALNNXXXXXXXXXNXDXXGXXSTXXTYDXFXXPXXXXXXXXXXXXXIXXXXXXFXKXXXXXRLGYFGXAFXXXXKBXXXXXXXXKEXYXILALXXXLRQXXXHXXXXXXXXXXXWLYXLXXXLXXEXXXTLDXXXDXXXXXINXXFXXXNKVNXXXLXXXXGXXXXXXXXXXYYDFXXXKXXKNLGFSIKKLREXMLXXXXAXXXXXXZYDSVRXKLYXLXDFXIYXXYXXEXXXXXEXXVXXLRXSXXDXEKXXXYXXEAXXLWXXXXXXXXXXXXXXXXGXXXKXXXKXBXDXXXXXXXXXXXXXXXXBVXXFSKLIYXLTXFLDGKEINDLLTTLINKFDNIXSFLXVMXELGLXXXFXXXYXXFXXSXXIXXELXXXKNXARMXKPXXXAKRXMYRDALXILGIXXXXXXXXIXXXLXXXXXXXDXXXXKXXKXXXGLRNFIANNVIXSXRFXYLXRYXNPXXXRXXAXNEKXXXFVLXXIPDXQIERYYESCXXXBXXXXXXXXXIXXLXXXIXXXXFXBFXBVXQXXXXXXNXXXXKEKXKAXIGLYLTVXYXXVKNLVNVNARYVIAFHCLERDXXLYXXXXXXXXXXXXXXXXLTXXXXXXXXXXXXXYLKXXXXXXXXXXXXXXXXXXXXXXXXXXXXXXXXXXXXXYRNXVXHLXAXRXXXXYIXDIXXVXSYFALYHYXXQRXLXXXXXXKXXXXXXXXXXXXXXHXTYXKDXVKALNXPFGYNXPRYKNLSIXXLFDRNEXXXXXXEXXKXXXXXDSQ

SEQ ID NO: 139 - DNA, 2718 bp, Artificial Sequence
  Gut metagenome P1E0 nCas1 sequence
atggaacgtgaggtcaaaaagccccccaaaaaatccttggcaaaggcggcgggactgaagtccaccttcgtcatttcgccgcaggagaaggagctggccatgaccgccttcgggcggggcaacgacgcgctgctgcaaaagcgcatcgtggacggcgtggtgcgggatgtggccggagagaagcagcagtttcaggtgcagcggcaggacgagagccgtttccgactgcaaaacagccgccttgccgaccgcacggtaacggcggacgacccgctgcaccgcgcggagacgccccgccgccagccgctgggcgcaggtatggatcagctgcgccgcaaggcaatactggagcagaaatacttcggcaggacgtttgacgacaacatccacatccaactgatctacaacatattggacatccacaagatgctggctgtccccgccaaccacatcgtccacacgctgaatctgctgggcggatacggcgagacggactttgtggggatgctgcccgccgggctgccgtatgacaagctgagggtcgtgaaaaaaaagaacggcgacaccgtggacatcaaggcggatatcgccgcctatgccaagcggccgcagctggcctatctgggtgcggcgttctatgacgtgacccccggcaagagcaaaagggacgcggcgcggggcagagtcaagcgcgagcaggacgtgtatgccattctctcgctgatgagccttctgcggcagttctgcgcccacgacagtgtgcggatatggggacagaacaccaccgccgccctgtatcatttgcaggcgctgccgcaggacatgaaggatctgctggatgacggctggcgcagggcgctgggcggcgtcaacgaccatttcctcgacaccaacaaggtgaacctgctgaccctgttcgagtactacggcgccgagacgaagcaggcgcgggtggcgctgacgcaggacttctaccgcttcgtggtgctgaaggagcagaagaacatgggcttctccctgaggcgtctgcgggaggagctgctgaagctgccggacgccgcctacctcaccggtcaggagtacgactcggtgcggcagaagctgtatatgctgctggacttcctgctgtgccgcctctacgcgcaggagcgggccgaccgctgcgaggagctggtgtccgcgctgcgctgcgccttgtcggatgaggaaaaggacaccgtctatcaggcggaggccgccgcgctgtggcaggcgctgggcgacacgctgcgccggaagctgctgccgctgctgaaaggcaaaaagctgcaagacaaggacaagaagaagtcggatgagctggggctgtcccgtgacgtgctggatggtgtgctgttccgccccgcacagcagggcagccgcgccaacgccgactatttctgccggctgatgcacctgtccacatggttcatggacggcaaggagatcaacaccctgctgaccaccctcatcagcaagcttgagaatatcgacagcctgcggagcgtgctggagagcatgggactggcgtacagctttgtaccggcctacgccatgtttgaccacagccgctatatcgccggtcagctgcgggtggtcaacaacatcgcgcggatgcgtaagcctgccatcggcgccaagcgggagatgtaccgcgccgccgtggtgctgctgggcgtggacagcccggaggcagccgcggccatcaccgacgacctgctgcagatcgacccggaaacggggaaggtgcgcccccgcagcgacagcgcacgggacacgggtctgcggaacttcatcgccaacaacgtggtggaatcccgccgcttcacctacctgctgcgctacatgacgccggagcaggcgcgcgtgctggcgcagaacgaaaagctcatcgccttcgtgctgtccaccgtgcccgacacccagctggagcgctactgccgcacctgcgggcgggaggacatcaccggccgtccggcgcagatacgttacctgacggcgcagatcatgggcgtccggtatgagagcttcaccgatgtggagcagcgcgggagaggggataaccccaaaaaggagcggtacaaggctctcatcggcctgtacctgacggtgctgtatctggcggtgaagaatatggtcaactgcaacgcccgctacgtcatcgccttctactgccgtgaccgtgacacagcgctctatcagaaggaggtctgctggtacgatctggaggaggacaagaaaagcggcaagcagcggcaggtggaggactacaccgccctgacccgctattttgtgtcgcagggctatctgaaccgccatgcctgcggctatctgcgaagcaatatgaacggcatcagcaacagcctgctgaccgcctaccgcaacgcggtggatcacctgaacgcgatcccgccgctgggcagcctgtgccgggacatcggccgggtggacagctactttgccctgtaccactacgccgtgcagcagtatctgaacggcagatattacagaaagacgccccgcgagcaggagctgtttgccgccatggcgcagcataggacatggtgcagcgatctggtgaaggcactgaacaccccctttggctacaacctcgcccgctacaagaacctgtccattgacggtctgtttgaccgcgagggcgaccatgtggtgcgggaggacggcgaaaaaccggcggag

SEQ ID NO: 140 - DNA, 2835 bp, Artificial Sequence
  Anaerobic digester nCas1 sequence
aataacaaaagaaaaaccaaagctaaggcagctggactcaaatccgtttttttcgaccaaaagcaagctgttttgacgacttttgcaaaaggcaataattctcaaatcgaaaagaaggtcgtaaatagcgaggttaaggatttgcgacaaccacctgcttttgatctcgaacttaaagagaagactttttatatcagcggtaaaaacaacatcaatacctcaagagaaaacccattggcttccgcgtcgcttcctctaagcaagcgacaacgaattagagcagaaagaattaaacgggcgagagaggagaatcgcccctaccataacgtaaagagagtcggcgaagatgacttacgggcgaaagccgatttagagaagcactatttcggaaaagaatactctgacaatttaaaaattcaaataatctacaacattctcgatataaataagattatttccccctatattaatgatattgtttattctatgaataatcttgctcgtaacgacgagtatattgatggcaagattgatgttatcggcagtttaagctcgacgaccgattactcttcatttatgagtccaaataaggatttagaaaaagaaaaaaaattctcttttcatcgcgaaaactacaaaaaatttgtcgaagcctctaagccatatatgcgatattatggaaaagtttttattcgcgatgtcaaaaagagcaaactcagcaccggcaagggcgagaaaatcgaagtcatgtatcgctctgacgaggaaattttcacaatcttccaaatattaagttatgttcgtcaaagcatcatgcataatgatataggcaataagtcatcgattttagcaatcgaaaaatatcctgcccgctttgttgggttcttatcggacttgcttaaaacaaaaacaaatgatgtcaatagaatgttcatcgataataatagccagactaatttctgggtacttttttctatctttggtcttcaagatcatacgagcggcgcggacaaaatttgtcgtaatttttatgatttcgtcattaaagccgatagcaaaaacttaggtttttcacttaaaaaaatacgggaattaatgctcgatttgccaaatgccaatatgcttagagatcatcaatttgacactgttcgcagcaagttttacacactgcttgatttcatcatttaccagcactatttagaagaaaagtcgcgaatagacaatatggttgagaagttaagaatgactttaaaagaggaagaaaaggaagtgctttatgctgccgaggcaaaaatagtctggaacgccatcggggcgaaagtcataaacaagcttgttccgatgatgaatggcgacgcgctaaaagagattaaaaggaaaaacagagaccgcaaattgcctcaaagcgttatcgcaacggtccaagttaattcagacgctaacgtatttagtggcctgatatacttccttaccctctttttagacggcaaagaaattaatgaaatggtcagcaaccttattaccaaattcgaaaacattgatagtttactccatgttgatcgcgaaatttataaaagcgatgaaaaggatctcgatttagaaattgaaaaactcgcccttttctttaaaggtgtcgtgcgaccgaacgctaaaacggataccggcgccggagaaatatctaaatcattttcgatatttcaatccgccgaaagaattatcgaggagctgaagtttatcaaaaatgtgacgcggatggataatgaaattttcccatcagaaggagtgtttttagatgcggcaaatgtcttgggagttagaggcgacgacttcgatttttcaaacgaatttgtcggtgatgatttgcattctgacgccaataaaaaaattatcaataagatcaacggcaccaaagaagatcgcaatttgcgcaacttcataataaataatgttgtcaagtcgcggcgctttcaatatatcgcccgccacatgaacacacactatgttaaacaactcgccaacaacgaaactctcaaccgctttgtcttaaataaaatgggtgatgctaaaatcattaaccgctactacgaaagcatcagtggaaacactccaaatatcgaggttagaagccagatcgattatttggttaaacgtcttcggagtttcagttttgaagatctcaacgacgtaaaacaaaaagtgaggcccggcacaaatgaaagcatagaaaaggaaaagaaaaaagcgctagtgggtctttgcttaaccattcaatacttggtatataagaatctcgtcaatataaacgctcgttatacgactgctttctattgtcttgaacgggacagcaaacttaaaggctttggagttgatgtttggcgagattttgaaagctatacagccctgacaaatcactttattaaagagggctatcttcctgtccgcaaggcagaaattttacgagcgaatttaaaacatcttgattgcgaagatggatttaaatattatcgcaaccaagtcacacaccttaacgccatccgcgtagcatacaaatatattaacgaaattaaaagtgttcactcatatttcgcgctctatcattatattatgcaacgccacctatatgattctttgcaggcaaaggcaaaagattctagtggttttgttattgacgccttaaaaaagagttttgagcacaagatttactcgaaggatcttttgcacgttcttcattcgcccttcggttacaatacggcccgatacaaaaacttaagtatcgaggcattatttgacaaaaacgaaagccggcccgaggtgaatcctttatcgaccaacgat

SEQ ID NO: 141 - DNA, 2769 bp, Artificial Sequence
  Ruminococcus sp. CAG:57 nCas1 sequence
atggcaaaaaagaataaaatgaagcctagagagctgcgtgaggctcagaaaaaagccagacagctcaaagcggctgagataaataataacgctgctcctgcgatcgctgccatgcctgctgcagaggtcattgcacctgtggcagagaagaaaaaatcctccgtaaaggcggcaggaatgaagtctattcttgtcagcgaaaataaaatgtacataacctctttcggcaagggcaattctgctgtgcttgaatatgaggtggacaataatgactacaacaaaactcagctttcttcaaaggacaacagcaatatcgagcttggtgatgtaaacgaggtaaacatcactttttcaagcaagcatggctttgggagcggagtggagataaatacttcaaaccctactcacagaagcggtgaaagctcgcctgtaagaggggatatgctggggcttaaatcggagcttgaaaagcgctttttcggcaaaacttttgatgataatatacatatccagcttatttacaacattctggatatcgaaaagatacttgcggtgtatgtaacgaatatcgtttatgcgctgaacaatatgcttggtataaaggattctgaaagttatgatgattttatggggtatctttctgcaagaaatacttatgaagtttttactcaccctgacaaaagcaatctttccgataaggtaaagggtaatatcaagaaaagccttagcaagtttaatgacttgctgaaaactaagcgccttggctatttcggccttgaagagccaaagacaaaagacacaagagcttcggaagcatacaaaaagcgtgtttatcatatgcttgcaattgtggggcagataagacagtgtgtttttcatgataaatcgggtgcaaaaagatttgacctttacagttttattaacaatattgatcccgaatacagagatactcttgactatcttgttgaggagcgtttaaagtccataaacaaggactttatcgagggtaacaaggtcaatatcagcctgcttattgatatgatgaaaggctatgaggctgatgatatcatacgcctttattacgatttcattgtgcttaaatctcagaaaaatctcggcttttctatcaaaaagcttcgtgagaaaatgctggaggaatacggtttcagatttaaggacaagcaatatgactctgtgcgctcaaagatgtacaagcttatggatttcctgcttttctgcaactactacagaaatgacgttgccgcaggcgaagctcttgtgcgtaaactgcgtttttcaatgaccgatgatgaaaaagaggggatatatgctgatgaagcggcaaagctttggggcaaattcaggaatgattttgaaaatatcgccgaccacatgaacggtgacgttatcaaggagcttggcaaggctgacatggattttgatgagaaaattcttgacagtgaaaagaagaatgcgtctgaccttttgtatttctccaaaatgatatatatgctcacatattttcttgacggcaaggagataaacgatcttcttacaacgcttatcagcaagtttgataacatcaaggagtttttgaagataatgaaaagctctgctgttgatgttgagtgtgagcttacggcgggctacaagctgttcaatgacagccagaggataaccaacgagctttttatcgtaaagaacattgcttccatgagaaagcctgcggcttcagcgaagcttacgatgttccgtgacgcactgactatactcggtatagacgacaatatcacggacgataggataagcgagattctaaaacttaaagaaaaaggcaagggcatacatggtctgagaaattttataacaaacaatgttatcgagtcctctcggtttgtataccttatcaagtatgcgaacgctcagaagataagagaagtggctaaggatgagaaagttgtcatgtttgttcttgggggtatccctgacacgcagatagagcgttattacaagagttgtgtggagtttcctgacatgaatagttctttggaagcaaagcgcagtgagcttgcgagaatgataaagaacatcagctttgatgatttcaaaaatgtgaaacagcaggcaaagggcagagaaaacgtggctaaggagagggcaaaggctgttatcgggctttatcttacggtcatgtatctgctggtgaaaaatcttgtgaatgtcaatgcaaggtatgttattgcgatacactgccttgaacgtgattttgggctgtataaggagataattcctgagttggcttcaaagaacttgaaaaatgactacaggatactttcacagacgctttgtgaactttgtgatgatcgtaatgagtcgtcgaatttgttcttgaaaaagaacaagcggctgcgcaagtgcgttgaagttgatatcaataatgcagacagcagcatgacaagaaaataccgcaactgtattgctcatcttactgtagttcgtgaactgaaagaatacataggagatattcgtacagtggattcttacttctccatttatcattatgttatgcagcgttgtatcacgaaaaggggagatgacacaaagcaagaagagaaaataaagtatgaggacgatcttttaaaaaatcacggctatacgaaagactttgtaaaggctctcaactcgccgtttggatacaacattccgaggtttaaaaatctttcaattgagcagttgtttgacagaaatgaatatcttactgaaaagtag

SEQ ID NO: 142 - DNA, 2715 bp, Artificial Sequence
  Human codon-optimized Gut metagenome P1E0 nCas1
gaaagggaggtgaagaagcctcccaagaaatccctggccaaagccgccggactgaagtccacattcgtcatcagcccccaggaaaaggaactcgctatgaccgcctttggcagaggcaacgatgccctgctgcaaaagagaatcgtggacggcgtggtccgtgatgttgccggagagaaacagcagttccaggtccagaggcaagacgagagcagattcagactccaaaactccagactggccgataggaccgtcaccgctgacgaccccctccacagggctgaaacacccaggagacagcctctgggcgctggcatggatcagctgaggagaaaagccattctggagcaaaagtactttggcaggacattcgacgacaacatccacatccagctgatctacaacatcctggacatccacaagatgctggctgtgcctgctaaccatatcgtgcacaccctgaacctcctgggaggctacggcgaaactgattttgtgggaatgctgcctgccggactcccctacgataagctcagggtcgtgaagaaaaaaaatggcgataccgtcgacatcaaggccgacattgctgcctatgccaaaagaccccagctggcttacctgggagctgccttctatgacgtgacccctggaaaaagcaagcgtgatgctgccaggggcagggtgaagagggaacaggacgtctatgccattctgtccctcatgtccctgctgagacaattctgcgcccacgatagcgtcaggatctggggccagaataccaccgccgccctgtaccacctccaggccctgccccaggatatgaaggacctgctggacgacggctggaggagagctctgggaggcgtgaatgaccatttcctcgacaccaacaaggtgaacctcctcaccctcttcgagtactatggcgccgaaaccaagcaggctagggtggccctgacacaggacttttacaggttcgtggtgctgaaggagcagaagaacatgggctttagcctcaggaggctgagggaagagctgctgaagctgcccgacgccgcttacctgaccggacaggagtacgactccgtgaggcagaaactgtacatgctcctggacttcctgctgtgcaggctgtacgcccaggagagagccgatagatgcgaagagctggtgagcgccctcagatgtgctctgagcgacgaggagaaggatacagtctaccaagctgaagccgctgccctgtggcaagccctgggcgacacactcaggaggaaactcctccccctcctgaagggcaagaaactgcaagacaaggataagaaaaagtccgacgaactcggcctgtccagggatgtgctcgatggcgtgctctttagacctgcccagcagggcagcagagccaacgccgactacttttgtaggctcatgcacctgagcacctggtttatggacggcaaggagatcaataccctgctgaccaccctgatctccaagctggagaatatcgatagcctgaggtccgtcctggagtccatgggcctggcctatagctttgtccctgcctacgccatgtttgaccacagcagatacatcgctggccagctgagggtggtgaacaacatcgccagaatgaggaaacccgccattggagccaaaagagagatgtacagggccgctgtcgtgctgctcggagtggacagccccgaagctgctgccgccattacagacgatctgctgcagatcgatcccgaaactggaaaggttcgtcctagatccgactccgctagagacaccggactgaggaacttcatcgctaacaacgtcgtggagagcaggaggttcacctacctcctgagatacatgacccctgaacaggccagggtcctggctcaaaacgagaagctgattgccttcgtgctcagcacagtgcccgacacccagctggagaggtattgtaggacctgtggaagggaggacatcacaggcaggcccgcccagattaggtatctgaccgctcagatcatgggcgtgaggtacgaaagctttaccgacgtggaacagaggggaaggggcgataatcctaaaaaggagagatacaaggccctgatcggcctctacctgacagtgctgtatctggccgtcaaaaatatggtgaattgtaacgccaggtacgtgatcgccttctactgcagggatagggacaccgccctctaccagaaggaagtgtgttggtatgacctggaggaggacaagaagtccggaaagcaaagacaggtcgaggactatacagccctgaccagatatttcgtgtcccagggctacctgaacagacacgcctgcggctatctcaggtccaacatgaacggcatcagcaacagcctgctgaccgcctacagaaatgccgtggaccacctgaacgccattcctcctctgggctccctgtgtagggacatcggcagagtggattcctacttcgctctgtaccactacgccgtgcaacagtacctcaatggaaggtattacagaaaaacacccagagaacaggaactcttcgccgccatggctcagcacaggacctggtgttccgatctcgtgaaggccctgaacacccctttcggatacaacctggccaggtacaagaacctctccatcgacggactgttcgacagggagggcgatcatgtggtgagagaggatggcgaaaaacctgccgaa

SEQ ID NO: 143 - DNA, 2835 bp, Artificial Sequence
  Human codon-optimized Anaerobic Digester  nCas1
aacaacaagagaaaaacaaaggctaaagccgccggcctgaagagcgtttttttcgatcagaagcaggccgtcctgaccacattcgctaaaggcaacaacagccagatcgagaagaaggtggtcaatagcgaagtgaaggacctgagacagccccctgcctttgacctcgaactgaaagaaaaaactttttacatcagcggaaagaataatatcaacaccagcagagagaaccctctggccagcgccagcctgcctctgtccaaaaggcagaggattagggctgagaggatcaagagggccagagaggagaacaggccctaccacaacgtcaaaagggtcggcgaggatgatctgagggccaaagccgacctggagaagcattattttggaaaggaatacagcgataatctcaagatccagatcatttataacattctggacatcaataagatcatcagcccctacatcaatgacatcgtgtactccatgaacaatctggccaggaatgatgagtatatcgacggcaagatcgatgtgatcggttctctgtcctccaccacagactatagcagcttcatgagccccaataaggatctggaaaaggagaagaaattcagctttcacagagaaaactataaaaaatttgtcgaggcctccaagccctacatgagatattacggcaaagtctttatcagggacgtgaaaaaatccaagctgtccaccggcaagggcgaaaagatcgaggtgatgtacaggagcgatgaagagattttcaccatcttccaaatcctgtcctacgtgaggcagagcatcatgcataatgacattggcaacaagagcagcatcctcgccatcgaaaaataccccgccagattcgtgggcttcctgtccgacctcttaaaaactaagaccaacgacgtgaacaggatgttcatcgataacaatagccagacaaatttctgggtcctgttctccatcttcggcctccaggaccatacaagcggcgctgataagatctgcaggaacttctatgatttcgtgatcaaggccgacagcaagaacctgggattctccctgaaaaagatcagggagctcatgctggacctccctaacgctaacatgctcagggatcaccagttcgacacagtgaggagcaagttctataccctcctcgactttatcatttaccagcattacctggaagagaagagcaggatcgacaacatggtcgagaagctcaggatgaccctgaaagaagaggagaaggaggtgctctacgctgccgaagccaagatcgtgtggaatgccattggcgccaaggtcatcaacaagctggtgcctatgatgaacggtgatgctctgaaggagattaaaagaaagaacagggataggaagctgccccagtccgtgatcgctaccgtccaggtgaatagcgatgccaatgtgttttccggcctcatctacttcctcaccctcttcctggacggcaaagagattaacgagatggtgagcaatctcatcaccaagttcgagaatatcgactccctgctgcatgtggatagggagatctataagtccgacgagaaggacctcgacctcgaaatcgagaaactggctctgtttttcaaaggcgtggtcaggcccaacgccaaaacagacacaggagctggcgaaatcagcaagagcttcagcattttccagagcgccgagaggatcatcgaggagctgaaatttatcaagaatgtgacaaggatggacaacgagatctttcccagcgagggagtgttcctggatgctgccaatgtgctgggcgtgagaggagatgacttcgacttttccaacgagttcgtcggcgatgacctccactccgatgccaataaaaagatcatcaacaaaatcaatggcaccaaggaggacaggaacctcagaaacttcattattaataatgtggtgaagagcaggaggttccaatacatcgccaggcacatgaatacccactatgtgaagcagctggccaacaacgagacactgaacaggttcgtgctcaacaaaatgggcgacgccaagattatcaacaggtactatgagtccatcagcggcaacacccccaatatcgaggtcagatcccagattgactacctcgtcaaaagactcaggagcttctccttcgaggacctcaatgacgtgaagcaaaaagtcagacccggcaccaacgaatccatcgagaaggaaaagaaaaaggctctcgtcggactctgcctgacaatccaatatctggtgtacaaaaacctggtcaacatcaacgctaggtacaccacagccttctactgcctggaaagggattccaagctgaagggctttggcgtggatgtgtggagggatttcgagagctacaccgctctgaccaaccacttcatcaaggaaggctatctccccgtcaggaaggccgagattctgagagccaatctgaagcatctggactgcgaggacggcttcaagtattacagaaaccaggtcacccatctgaacgccatcagagtggcttataagtatattaacgaaattaagtccgtgcacagctactttgccctgtaccactacatcatgcagaggcacctctatgactccctccaagccaaagccaaggatagctccggcttcgtcattgacgccctgaagaagtccttcgaacataaaatctacagcaaagacctcctgcacgtgctccattcccctttcggctacaacaccgccaggtacaagaacctgagcatcgaggctctgttcgacaagaatgagagcaggcctgaagtcaaccccctctccaccaacgac

SEQ ID NO: 144 - DNA, 2898 bp, Artificial Sequence
  Human codon-optimized Ruminococcus flavefaciens XPD nCas1
atcgaaaaaaaaaagtccttcgccaagggcatgggcgtgaagtccacactcgtgtccggctccaaagtgtacatgacaaccttcgccgaaggcagcgacgccaggctggaaaagatcgtggagggcgacagcatcaggagcgtgaatgagggcgaggccttcagcgctgaaatggccgataaaaacgccggctataagatcggcaacgccaaattcagccatcctaagggctacgccgtggtggctaacaaccctctgtatacaggacccgtccagcaggatatgctcggcctgaaggaaactctggaaaagaggtacttcggcgagagcgctgatggcaatgacaatatttgtatccaggtgatccataacatcctggacattgaaaaaatcctcgccgaatacattaccaacgccgcctacgccgtcaacaatatctccggcctggataaggacattattggattcggcaagttctccacagtgtatacctacgacgaattcaaagaccccgagcaccatagggccgctttcaacaataacgataagctcatcaacgccatcaaggcccagtatgacgagttcgacaacttcctcgataaccccagactcggctatttcggccaggcctttttcagcaaggagggcagaaattacatcatcaattacggcaacgaatgctatgacattctggccctcctgagcggactgaggcactgggtggtccataacaacgaagaagagtccaggatctccaggacctggctctacaacctcgataagaacctcgacaacgaatacatctccaccctcaactacctctacgacaggatcaccaatgagctgaccaactccttctccaagaactccgccgccaacgtgaactatattgccgaaactctgggaatcaaccctgccgaattcgccgaacaatatttcagattcagcattatgaaagagcagaaaaacctcggattcaatatcaccaagctcagggaagtgatgctggacaggaaggatatgtccgagatcaggaaaaatcataaggtgttcgactccatcaggaccaaggtctacaccatgatggactttgtgatttataggtattacatcgaagaggatgccaaggtggctgccgccaataagtccctccccgataatgagaagtccctgagcgagaaggatatctttgtgattaacctgaggggctccttcaacgacgaccagaaggatgccctctactacgatgaagctaatagaatttggagaaagctcgaaaatatcatgcacaacatcaaggaatttaggggaaacaagacaagagagtataagaagaaggacgcccctagactgcccagaatcctgcccgctggccgtgatgtttccgccttcagcaaactcatgtatgccctgaccatgttcctggatggcaaggagatcaacgacctcctgaccaccctgattaataaattcgataacatccagagcttcctgaaggtgatgcctctcatcggagtcaacgctaagttcgtggaggaatacgcctttttcaaagactccgccaagatcgccgatgagctgaggctgatcaagtccttcgctagaatgggagaacctattgccgatgccaggagggccatgtatatcgacgccatccgtattttaggaaccaacctgtcctatgatgagctcaaggccctcgccgacaccttttccctggacgagaacggaaacaagctcaagaaaggcaagcacggcatgagaaatttcattattaataacgtgatcagcaataaaaggttccactacctgatcagatacggtgatcctgcccacctccatgagatcgccaaaaacgaggccgtggtgaagttcgtgctcggcaggatcgctgacatccagaaaaaacagggccagaacggcaagaaccagatcgacaggtactacgaaacttgtatcggaaaggataagggcaagagcgtgagcgaaaaggtggacgctctcacaaagatcatcaccggaatgaactacgaccaattcgacaagaaaaggagcgtcattgaggacaccggcagggaaaacgccgagagggagaagtttaaaaagatcatcagcctgtacctcaccgtgatctaccacatcctcaagaatattgtcaatatcaacgccaggtacgtcatcggattccattgcgtcgagcgtgatgctcaactgtacaaggagaaaggctacgacatcaatctcaagaaactggaagagaagggattcagctccgtcaccaagctctgcgctggcattgatgaaactgcccccgataagagaaaggacgtggaaaaggagatggctgaaagagccaaggagagcattgacagcctcgagagcgccaaccccaagctgtatgccaattacatcaaatacagcgacgagaagaaagccgaggagttcaccaggcagattaacagggagaaggccaaaaccgccctgaacgcctacctgaggaacaccaagtggaatgtgatcatcagggaggacctcctgagaattgacaacaagacatgtaccctgttcagaaacaaggccgtccacctggaagtggccaggtatgtccacgcctatatcaacgacattgccgaggtcaattcctacttccaactgtaccattacatcatgcagagaattatcatgaatgagaggtacgagaaaagcagcggaaaggtgtccgagtacttcgacgctgtgaatgacgagaagaagtacaacgataggctcctgaaactgctgtgtgtgcctttcggctactgtatccccaggtttaagaacctgagcatcgaggccctgttcgataggaacgaggccgccaagttcgacaaggagaaaaagaaggtgtccggcaattcc

SEQ ID NO: 145 - DNA, 2829 bp, Artificial Sequence
  Human codon-optimized Ruminococcus albus nCas1
gccaagaagtccaagggaatgtccctcagggagaagagggagctggagaagcaaaagaggattcagaaggccgccgtgaatagcgtgaacgatacccctgaaaaaactgaggaggctaatgtggtcagcgtgaacgtgagaaccagcgccgagaacaagcactccaaaaagagcgctgccaaagccctgggcctgaaaagcggcctcgtgattggagatgagctctacctgaccagcttcggaaggggcaacgaagccaagctggagaagaagattagcggcgacaccgtggagaaactgggaattggcgcctttgaggtcgccgaacgtgatgaaagcacactcacactcgagagcggcaggatcaaagacaaaaccgccaggcctaaggaccccagacatattaccgtggacacccagggaaagtttaaggaggacatgctgggcatcaggtccgtgctcgaaaagaagatctttggaaaaaccttcgacgataacatccacgtccagctggcctacaacatcctggacgtcgagaagatcatggctcagtatgtgagcgacatcgtctacatgctgcacaacaccgacaagaccgagaggaacgataacctgatgggatacatgtccattagaaatacctacaaaaccttctgcgacacatccaatctgcccgacgacacaaagcagaaggtggagaatcagaaaagggaattcgacaagatcattaagagcggcagactgggctacttcggcgaagctttcatggtcaacagcggcaactccaccaagctgaggcccgagaaagagatttatcatatcttcgccctcatggccagcctgaggcagagctacttccacggatacgtcaaggataccgactatcagggcacaacatgggcctacacactggaggataagctgaagggccccagccatgaatttagggagacaatcgacaagatctttgacgagggattcagcaagatctccaaggacttcggaaaaatgaacaaagtgaatctccaaatcctggagcagatgatcggcgagctgtacggaagcatcgaaaggcagaacctgacctgcgattactacgattttattcaactcaagaagcacaagtatctcggctttagcatcaagaggctgagagagacaatgctcgagacaacccctgccgagtgttataaggctgagtgctacaatagcgagaggcaaaagctctacaagctgatcgacttcctcatctacgacctctactataacaggaagcccgccagaatcgaagagatcgtcgacaagctgagagagagcgtcaacgacgaggagaaggagagcatctatagcgtggaggccaagtacgtgtatgagtccctgagcaaggtgctggataagagcctgaagaattccgtgtccggcgaaactatcaaggatctgcagaagaggtacgacgacgaaactgccaacagaatttgggacatctcccagcactccatttccggcaatgtcaactgcttctgcaagctgatctacattatgaccctcatgctggatggaaaggagatcaacgacctcctcaccaccctggtgaacaagtttgacaatattgcttcctttattgacgtgatggacgaactcggcctggaacacagctttacagacaactacaagatgtttgccgacagcaaggccatctgcctggacctgcaattcatcaatagctttgctagaatgagcaagatcgacgacgagaaaagcaagagacagctgttcagggatgctctggtgatcctcgatatcggaaacaaggacgaaacttggattaacaactacctcgactccgacatcttcaagctggacaaggaaggcaacaagctgaagggagccaggcatgactttaggaattttatcgccaataatgtcattaagtcctccagattcaagtacctcgtcaaatacagctccgccgacggcatgattaagttaaaaactaacgaaaagctgattggcttcgtgctcgacaagctccccgaaactcaaatcgataggtactacgaatcctgcggcctcgacaatgccgtcgtggacaagaaggtgaggatcgagaaactgtccggactcatcagggacatgaagttcgacgatttttccggcgtcaagacctccaataaggccggcgacaacgataagcaggacaaggccaagtaccaggccattatctccctgtacctgatggtgctctaccagattgtgaagaatatgatctacgtcaacagcaggtatgtgattgccttccactgcctggagagggacttcggaatgtacggcaaggatttcggcaagtactaccagggctgtaggaagctcaccgatcatttcatcgaggagaaatacatgaaggagggcaagctgggctgtaacaagaaagtcggcaggtacctgaagaataacatcagctgttgcaccgacggcctgattaacacctacaggaaccaggtcgatcatttcgccgtcgtcagaaaaatcggaaattacgccgcctacatcaaatccattggcagctggttcgagctctatcattacgtgattcagaggatcgtttttgacgaatatagattcgccctcaacaacaccgagtccaactataagaacagcatcattaagcaccatacatactgcaaggacatggtgaaggccctgaatacccctttcggctacgacctgcccagatataaaaacctgagcattggtgatttattcgacaggaacaactatctgaacaaaacaaaggagtccatcgatgccaactccagcattgatagccag

SEQ ID NO: 146 - DNA, 330 bp, Artificial Sequence
  Artificial sequence
ctactacactggtgcgaatttgcactagtctaaaacaagctttttcttcattgtctacaaatgcaactactacactagtgcgaatttgcactagtctaaaactctatgtagcttttcttgtaaaacatatttctactacactggtgcgattttgcactagtctaaaactcatctgccttctgcatatcggacacttgactactacaccggtgcgaatttgcactagtctaaaacttacacctccttatgcgattttatcgtgcgctactacactggtgcgaatttgcactagtctaaaacttcatcttcaagaccgagcagggacatcat

SEQ ID NO: 147 - protein, 939 aa, Artificial Sequence
  Metagenomic hit (no protein accession):  contig emb|OBVH01003037.1, human gut metagenome sequence (also found in WGS contigs emb|OBXZ01000094.1| and emb|OBJF01000033.1|)
MAKKKRITAKERKQNHRELLMKKADSNAEKEKAKKPVVENKPDTAISKDNTPKPNKEIKKSKAKLAGVKWVIKANDDVAYISSFGKGNNSVLEKRIMGDVSSNVNKDSHMYVNPKYTKKNYEIKNGFSSGSSLVTYPNKPDKNSGMDALCLKPYFEKDFFGHIFTDNMHIQAIYNIFDIEKILAKHITNIIYTVNSFDRNYNQSGNDTIGFGLNYRVPYSEYGGGKDSNGEPKNQSKWEKRDNFIKFYNESKPHLGYYENIFYDHGEPISEEKFYNYLNILNFIRNNTFHYKDDDIELYSENYSEEFVFINCLNKFVKNKFKNVNKNFISNEKNNLYIILNAYGKDTENVEVVKKYSKELYKLSVLKTNKNLGVNVKKLRESAIEYGYCPLPYDKEKEVAKLSSVKHKLYKTYDFVITHYLNSNDKLLLEIVETLRLSKNDDEKENVYKKYAEKLFKADDVINPIKAISKLFARKGNKLFKEKIIIKKEYIEDVSIDKNIYDFTKVIFFMTCFLDGKEINDLLTNIISKLQVIEDHNNVIKFISNNKDAVYKDYSDKYAIFRNAGKIATELEAIKSIARMENKIENAPQEPLLKDALLSLGVSDDTKVLENTYNKYFDSKEKTDKQSQKVSTFLMNNVINNNRFKYVIKYINPADINGLAKNRYLVKFVLSKIPEEQIDSYYKLFSNEEEPGCEEKIKLLTKKISKLNFQTLFENNKIPNVEKEKKKAIITLYFTIVYILVKNLVNINGLYTLALYFVERDGYFYKDICGKKDKKKSYNDVDYLLLPEIFSGSKYREETKNLKLPKEKDRDIMKKYLPNDKDREKYNKFFTAYRNNIVHLNIIAKLSELTKNIDKDINSYFDIYHYCTQRVMFNYCKEKNDVVLAKMKDLAHIKSDCNEFSSKHTYPFSSAVLRFMNLPFAYNVPRFKNLSYKKFFDKQ

SEQ ID NO: 148 - DNA, 36 bp, Artificial Sequence
  DR sequence
gattgaaaggattgtaaatttgcaaggtcttaaaac

SEQ ID NO: 149 - protein, 958 aa, Artificial Sequence
  Metagenomic hit (no protein accession):  contig tpg|DBYI01000091.1| (Uncultivated Ruminococcus flavefaciens UBA1190 assembled from bovine gut metagenome)
MKKKIKARDLREAKKQEKLAAFSAKANTVYENEDKNVEAFPEALNLRSIKKSMNKAAGLKSTLIDGKSLYLTAFGKGNNAVVEHMIATDDSYSLKTLENEPSLKVKAADELKVTFMSRRPFVQESELSAVNPLHSGKDKPNKSAGQDMLGLKSELEKRYFGKIFDDNLHIQIIHNILDIEKIIAVYATNITAAIDHMVDDDNEQYLQGDFIGYMNTLNTYEVFMEPSKNPRLDSNARKNIENSREKFEYLLDTQRLGYLSLEYDKRSKDKRKSEEIKKRLYHLVAFAGQLRQWSFHSVEGLPRTWIYQLDNPKLAQEYRDTLDYFFNERFDAINKDFIETNNINLHILKEVFPAEDFQKLAALYYDFIVKKTFKNIGFSIKNLREQMLECDEAEKIRSKDMNSVRSKLYKLFDFCIFYQYFIDEERSRENVNYLRSTLNDEQKDAFYEEEGKRLWSENRKKFIYFCDNINKWVKNDYSDEVAKCIDLNEFRVNSNVSYFSKLLYAMSFFLDGKEINDLLTTLINKFDNIRSFIDTANFLNIDVKFTKDYDFFNIICDYAGELNIIKNIARMKKPSPSAKKNMYRDALTILGIPTEMSDEQLDAEIDKILEKKINPVTGKTEKGKNPFRNFIANNVIENKRFIYVIKFCNPKNVRKLVNNTKVTEFVLKRMPETQIDRYFESCIEGNLNPTTEKKIEKLAEMIKNIKFEEFRNVKQKVRDNSQEAVEKERFKAIIGLYLTVIYLLVKNLVNVNSRYVMAFHCLERDAKLYGVQNIGGDYLALTAKLCAEGDDYGKKLSEAKQNINQDKVQMPKNYFLARNKRWREAIEQDIDNAKKWFIGEKFNNVKNYRNNVAHLTAIRNCAEFIGEITKIDSYFALYHYLIQRQLAGRLDPNHPGFEKNYPQYAPLFKWNTYVKDMVKALNSPFGYNIPRFKDLSIDALFDRNEMKEETDDEKKIQT

SEQ ID NO: 150 - DNA, 36 bp, Artificial Sequence
  DR 1
gaactatacccctaccaaatggtcggggtctgaaac

SEQ ID NO: 151 - DNA, 37 bp, Artificial Sequence
  DR2
tgaactacacccctgccaagtggttggggtctgaaac

SEQ ID NO: 152 - DNA, 36 bp, Artificial Sequence
  DR3
gaactacacccctaccaagtggttggggtctgaaac

SEQ ID NO: 153 - protein, 877 aa, Artificial Sequence
  Metagenomic hit (no protein accession):  contig tpg|DJXD01000002.1| (uncultivated Ruminococcus assembly, UBA7013, from sheep gut metagenome)
MKKQKSKKTVSKTSGLKEALSVQGTVIMTSFGKGNMANLSYKIPSSQKPQNLNSSAGLKNVEVSGKKIKFQGRHPKIATTDNPLFKPQPGMDLLCLKDKLEMHYFGKTFDDNIHIQLIYQILDIEKILAVHVNNIVFTLDNVLHPQKEELTEDFIGAGGWRINLDYQTLRGQTNKYDRFKNYIKRKELLYFGEAFYHENERRYEEDIFAILTLLSALRQFCFHSDLSSDESDHVNSFWLYQLEDQLSDEFKETLSILWEEVTERIDSEFLKTNTVNLHILCHVFPKESKETIVRAYYEFLIKKSFKNMGFSIKKLREIMLEQSDLKSFKEDKYNSVRAKLYKLFDFIITYYYDHHAFEKEALVSSLRSSLTEENKEEIYIKTARTLASALGADFKKAAADVNAKNIRDYQKKANDYRISFEDIKIGNTGIGYFSELIYMLTLLLDGKEINDLLTTLINKFDNIISFIDILKKLNLEFKFKPEYADFFNMTNCRYTLEELRVINSIARMQKPSADARKIMYRDALRILGMDNRPDEEIDRELERTMPVGADGKFIKGKQGFRNFIASNVIESSRFHYLVRYNNPHKTRTLVKNPNVVKFVLEGIPETQIKRYFDVCKGQEIPPTSDKSAQIDVLARIISSVDYKIFEDVPQSAKINKDDPSRNFSDALKKQRYQAIVSLYLTVMYLITKNLVYVNSRYVIAFHCLERDAFLHGVTLPKMNKKIVYSQLTTHLLTDKNYTTYGHLKNQKGHRKWYVLVKNNLQNSDITAVSSFRNIVAHISVVRNSNEYISGIGELHSYFELYHYLVQSMIAKNNWYDTSHQPKTAEYLNNLKKHHTYCKDFVKAYCIPFGYVVPRYKNLTINELFDRNNPNPEPKEEV

SEQ ID NO: 154 - DNA, 36 bp, Artificial Sequence
  DR
caactacaaccccgtaaaaatacggggttctgaaac

SEQ ID NO: 155 - protein, 984 aa, Artificial Sequence
  Metagenomic hit (no protein accession): contig OGZC01000639.1 (human gut metagenome assembly)
MKKKNIRATREALKAQKIKKSQENEALKKQKLAEEAAQKRREELEKKNLAQWEETSAEGRRSRVKAVGVKSVFVVGDDLYLATFGNGNETVLEKKITPDGKITTFPEEETFTAKLKFAQTEPTVATSIGISNGRIVLPEISVDNPLHTTMQKNTIKRSAGEDILQLKDVLENRYFDRSFNDDLHIRLIYNILDIEKILAEYTTNAVFAIDNVSGCSDDFLSNFSTRNQWDEFQNPEQHREHFGNKDNVICSVKKQQDLFFNFFKNNRIGYFGKAFFHAESERKIVKKTEKEVYHILTLIGSLRQWITHSTEGGISRLWLYQLEDALSREYQETMNNCYNSTIYGLQKDFEKTNAPNLNFLAEILGKNASELAEPYFRFIITKEYKNLGFSIKTLREMLLDQPDLQEIRENHNVYDSIRSKLYKMIDFVLVYAYSNERKSKADALASNLRSAITEDAKKRIYQNEADQLWTSYQELFKRIRGFKGAQVKEYSSKNMPIPIQKQIQNILKPAEQVTYFTKLMYLLTMFLDGKEINDLLTTLINKFDNISSLLKTMEQLELQTTFKEDYTFFQQSSRLCKEITQLKSFARMGNPISNLKEVMMVDAIQILGTEKSEQELQSMACFFFRDKNGKKLNTGEHGMRNFIGNNVISNTRFQYLIRYGNPQKLHTLSQNETVVRFVLSRIAKNQRVQGMNGKNQIDRYYETCGGTNSWSVSEEEKINFLCKILTNMSYDQFQDVKQSGAEITAEEKRKKERYKAIISLYLTVLYQLIKNLVNINARYIIAFHCLERDAILYSSKFNTSINLKKRYTALTEMILGYETDEKARRKDTRTVYEKAEAAKNRHLKNVKWNCKTRENLENADKNAIVAFRNIVAHLWIIRDADRFITGMGAMKRYFDCYHYLLQRELGYILEKSNQGSEYTKKSLEKVQQYHSYCKDFLHMLCLPFAYCIPRYKNLSIAELFDRHEPEAEPKEEASSVNNSQFITT

SEQ ID NO: 156 - DNA, 33 bp, Artificial Sequence
  DR 1
actacaatccatggttatcgtggatactaaaac

SEQ ID NO: 157 - DNA, 33 bp, Artificial Sequence
  DR2
actacaatccacgtttatcgtggatactaaaac

SEQ ID NO: 158 - protein, 978 aa, Artificial Sequence
  Metagenomic hit (no protein accession): contig emb|OHBM01000764.1 (human gut metagenome assembly)
  misc_feature (1)..(222): Xaa can be any naturally occurring amino acid
XXXXXXXXXXXXXXXXXXXXXXXXXXXXXXXXXXXXXXXXXXXXXXXXXXXXXXXXXXXXXXXXXXXXXXXXXXXXXXXXXXXXXXXXXXXXXXXXXXXXXXXXXXXXXXXXXXXXXXXXXXXXXXXXXXXXXXXXXXXXXXXXXXXXXXXXXXXXXXXXXXXXXXXXXXXXXXXXXXXXXXXXXXXXXXXXXXXXXXXXXXXXXXXXXXXXXXXXXXXXXXHPLQKRYRYLTSTNLKSFETYKNNLVNKKKFDLDRVKKIPQLAYFGSAFYNTPEDTSAKITKTKIKSNEEIYYTFMLLSTARNFSAHYLDRNRAKSSDAEDFDGTSVIMYNLDNEELYKKLYNKKVHMALTGMKKVLDANFNKKVEHLNNSFIKNSAKDFVILCEVLGIKSRDEKTKFVKDYYDFVVRKNYKHLGFSVKELRELLFANHDSNKYIKEFDKISNKKFDSVRSRLNRLADYIIYDYYNKNNAKVSDLVKYLRAAADDEQKKKIYLNESINLVKSGILERIKKILPKLNGKIIGNMQPDSTITASMLHNTGKDWHPISENAHYFTKWIYTLTLFMDGKEINDLVTTLINKFDNIASFIEVLKSQSVCTHFSEERKMFIDSAEICSELSAMNSFARMEAPGASSKRAMFVEAARILGDNRSKEELEEYFDTLFDKSASKKEKGFRNFIRNNVVDSNRFKYLTRYTDTSSVKAFSNNKALVKFAIKDIPQEQILRYYNSCFGASERYYNDGMSDKLVEAIGKINLMQFNGVIQQADRNMLPEEKKKANAQKEKYKSIIRLYLTVCYLFFKNLVYVNSRYYSAFYNLEKDRSLFEINGELKPTGKFDEGHYTGLVKLFIDNGWINPRASAYLTVNLANSDETAIRTFRNTAEHLEALRNADKYLNDLKQFDSYFEIYHYITQRNIKEKCEMLKEQTVKYNNDLLKYHGYSKDFVKALCVPFGYNLPRFKNLSIDALFDKNDKREKLKKGFED

SEQ ID NO: 159 - DNA, 36 bp, Artificial Sequence
  DR
gaactacagccctccttaaatggggggttctaaaac

SEQ ID NO: 160 - protein, 1023 aa, Artificial Sequence
  Metagenomic hit (no protein accession): contig emb|OHCP01000044.1 (human gut metagenome assembly)
MAKKITAKQKREEKERLNKQKWAKNDSVIIVPETKEEIKTGEIQDNNRKRSRQKSQAKAMGLKAVLSFDNKIAIASFVSSKNAKSSHIERITDKEGTTISVNSKMFESSVNKRDINIEKRITIEEPQQDGTIKKEEKGVKSTTCNPYFKVGGKDYIGIKEIAEEHFFGRAFPNENLRVQIAYNIFDVQKILGTFVNNIIYSFYNLSRDEVQSDNDVIGMLYSISDYDRQKETETFLQAKSLLKQTEAYYAYFDDVFKKNKKPDKNKEGDNSKQYQENLRHNFNILRVLSFLRQICMHAEVHVSDDEGCTRTQNYTDSLEALFNISKAFGKKMPELKTLIDNIYSKGINAINDEFVKNGKNNLYILSKVYPNEKREVLLREYYNFVVCKEGSNIGISTRKLKETMIAQNMPSLKEENTYRNKLYTVMNFILVRELKNCATIREQMIKELRANMDEEEGRDRIYSKYAKEIYLYVKDKLKLMLNVFKEEAEGIIIPGKEDPVKFSHGKLDKKEIESFCLTTKNTEDITKVIYFLCKFLDGKEINELCCAMMNKLDGISDLIETAKQCGEDVEFVDQFKCLSKCATMSNQIRIVKNISRMKKEMTIDNDTIFLDALELLGRKIEKYQKDKNGDYVKDEKGKKVYTKDYNNFQDMFFEGKNHRVRNFVSNNVIKSKWFSYVVRYNKPAECQALMRNSKLVKFALDELPDSQIEKYYISVFGEKSSSSNEEMRRELLKKLCDFSVRGFLDEIVLLSEDEMKQKDKFSEKEKKKSLIRLYLTIVYLITKSMVKINTRFSIACATYERDYILLCQSEKAERAWEKGATAFALTRKFLNHDKPTFEQYYTREREISAMPQEKRKELRKENDQLLKKTHYSKHAYCYIVDNVNNLTGAVANDNGRGLPCLSEKNDNANLFLEMRNKIVHLNVVHDMVKYINEIKNITSYYAFFCYVLQRMIIGNNSNEQNKFKAKYSKTLQEFGTYSKDLMWVLNLPFAYNLPRYKNLSNEQLFYDEEERMEKIVGRKNDSR

SEQ ID NO: 161 - DNA, 36 bp, Artificial Sequence
  DR
gtactaaagcccgctagtatagacgggttctaagac

SEQ ID NO: 162 - protein, 926 aa, Artificial Sequence
  Metagenomic hit (no protein accession): contig emb|OGDF01008514.1| (human gut metagenome assembly)
MTETKPKREDIAKTPAAKSRSKAAGLKSTFAVNGSVLLTSFGRGNDAVPEKLITEKAVSEINTVKPRFSVEKPATSYSSSFGIKSHISATADNPLAGRAPVGEDAIHAKEVLEQRVFGKTFSDDNIHIQLIYNILDIRKILSTYANNVVFTINSMRRLDEYDREQDYLGYLYTGNSYERLLDIADKYAVDGEDWRNTAAGISNDFEKKQFQTINGFWDLLDMIEPYMCYFSEAFFCETTVKDPDSGRIVPCLEQRSDGDIYNILRILSIVRQTCMHDNASMRTVMFTLGQNSVRDRKNGFDELAELLDYLYDEKIDIVNRDFLRNQKNNIELLSRIYGSSADSPERDRLVQNFYDFRVLSQDKNLGFSIKKLREKLLDSPALSVVRSKKYDTMRSKIYSLIDFMIYRKFSENHVAVDDFVEELRSLLTEDEKESAYSRWAETLINDGFAQEILVKLLPQTDPAVIGKIKGKKLLNDSIAGIKLKKDASFFTKIINVLCMFQDGKEINELVSSLVNKFANIQSFVDVMRSQGIDSGFTADYAMFAESGRISRELHILKGIARMQHSIAGLGDVKIYGSDDKFHGVSRRVYTDAAYILGFGERSEDNDGYVDDYVSSKLLGGADKNLRNFITNNVIKNRRFLYTVRYMNPKRAKKLVQNDALVVLALSGIPETQIDRYYKSCIEKRSFNPDLNEKIAALSEMITTLKIDDFEDVKQNPEKNANYEAKKNQRISKERYKACIGLYLTVLYLICKNLVKINARYSIAIGCLERDTQLHGVDFKGAAYMTRDVFIAKGWINPKKPTVKSIKEQYAFLTPYIFTTYRNMIAHLAAVTNAYKYIPQMDRFKSWFHLYHTVIQHSLIQQYEYDRDYGRKGAPVVSERVLQLLEQCREHSNYSRDLLHILNLPFGYNLPRYLNLSSEKYFDANAI

SEQ ID NO: 163 - DNA, 36 bp, Artificial Sequence
  DR
ctactacactggtgcgaatttgcactagtctaaaac

SEQ ID NO: 164 - protein, 1030 aa, Artificial Sequence
  Metagenomic hit (no protein accession): contig emb|OGPN01002610.1 (human gut metagenome assembly)
MAKKITAKQKREEKERLNKQKWAKQDTPVVPKSKTEEKPVAASDDKLLKTTQVKKVQTKSKAKAMGLKTVLSFDDKIAIASFVNDKKTKLPHIERITDKSGTTIHENARMFDSSVDEQNVNIEKRMTIEEKQNDGTFKKDEKDVKATICNPYFKTCGKDYIGIKDVAEKYFFGKTFPNENLRVQIAYNVFDIQKILGTYVNNIIYSFYNLRRDGKSDVDIIGSLYAFADFDNQLKDKPAFREAKDLLKNTEAYFSYFGDVFKKSKKGKKDENNEDYEKNLRHNFNVLRVLSFLRQICTHAYVKCTGGAKNNGDSTKVEAESLDALFNITEYFAKTAPELSKTINEIYKEGIDRINNDFVTNGKNNLYILSKVYPDMQRNELVKKYYQFVVCKEGNNVGINTRKLKESIISQHPWITTPQDNNKANDYESCRHKLYTIMCFILVAELDAHESIRDNMVAELRANMDGDDGRDAIYEKYAKDIYHIVKDKLLAMQKVFDEELVPVKVEGKNDPQQFTHGKLGKKEIESFCLSDKNTSDIAKVVYFLCNFLDGKEINELCCAMMNKFDGIGDLIDTAKQCGEEVKFIEEFACLSNCRKITNDIRVAKSISKMKNKVNIDNDIIYLDAIELLGRKIEKYQKDENGKILLGTDGKRLYTQEYKYFNDMFFNAGNHKVRNFIANNVMQSKWFFYVVRYNKPAECQIIMRNKTLVKFTLDDLPDMQIQRYYSSVFGDNNMPAVDEMRKRLLDKINQFSVRGFLDELDEIVLMSDEESKRNKSSEKEQKKSLIRLYLTIAYLITKSMVKINTRFSIACAMYERDYALLCQSEMKGGPWDGGAQALAVTRKFLNHDREVFDRYCAREAEIARLPSEERKPLRKANDKLLKQTHYTNHSYTYIVNNLNSFTDIDYCAKDVGLPAPNDKNDNASILGEMRNDIAHLNIVHDMVKYIEELKDISSYYAFYCYVLQRRLVGKDPNCQNKFKAKYAKELNDYGTYNKNLMWMLNLPFAYNLPRYKNLSSEFLFYDMEYNKKDDE

SEQ ID NO: 165 - DNA, 35 bp, Artificial Sequence
  DR
gaacccgtctatactagcgggctttagtacaaaac

SEQ ID NO: 166 - protein, 1001 aa, Artificial Sequence
  Metagenic hit (no protein accession): contig NFIR01000008.1 (Eubacterium sp. An3, from chicken gut metagenome)
MAKKLRPKELREKRRMAEKEEHKKQEKLRKEQEELRKKQEKQREDQKELEKIKKEEGGEGEKKKSGAKALGLKSTFILDRDEQKMLMTSFGRGNKAVRDKYIIGDKVSDIDDSWENKKAALSVEVCGKSFNISKKENDDCEPVKVNNPVLSGNKKDDDLIHCRKNLEEMYFGQQFKDNIHIQLIYNILDIEKILAVQINNIVFILNNLLRWSGEEEFDLIGSLGVNHTYEEFRGRNKNYGKFSELIKQSQMRYFGSTFCLFNENEERITSENKKEWKRFEKKCYHLLAVLGMMRQATAHGDSKRRAEIYKLGKEFDRLEARGCRPEARKELDELYKKKIHEMNQGFLKNSKSDILMLFRIYNAESKEAKRKLAQEYYEFIMLKSYKNTGFSIKHLRETMIDKMDEDKKEKLKDDKYNPIRRKIYRIMDFMIYQYYQEPEHQEEAEELVRKLRNAEIEAKKELAYRKEAEKLKKELEKIIFNSVLPSCDRILSEMDERRNKKVNQESSDTDKEEPLDSEIAEGITFIKETAHSFSEMIYLLTVFLDGKEINILLTQLIHCFDNISSFMDTMEEENLLTKLKEDYEIFEESKEISRELRIINSFARMTEPVPKTERIMFIEAAQILGYSNGEKELEGYVDALLDTKNKTNDKKKKGFVRYIWNNVIKSTRFRYLVRYADPKKVRAFAANKKVVAFVLKDIPDDQIRAYYNSCFRQNSDSSSNNSNASWDADSNKRDISVSDMRKALTEKITGLNFGDFEEESKKGIRKEESDKNIIRLYLTVLYLVQKNLIYVNSRYFLAFHCAERDEMLYNGETIDNNKEKGSEKDWRKFAKQFIMEHSPKKKVKDYLAKNFEYSNKWSLKEFRNSVQHLNVIRDAHKYIKYINDNKDVQSYFALYHYLVQRYISERAANRTDKESLSEGRLQYYLSQVKEYRTYCKDFVKALNVPFAYNLPRYKNLSIDELFDRNNYLPNKAKKWIPEKKENGEYVMEDCGNKDAGQVENA

SEQ ID NO: 167 - DNA, 35 bp, Artificial Sequence
  DR
gaactacactctggctgaaagtcagggtctaaaac

SEQ ID NO: 168 - protein, 1006 aa, Artificial Sequence
  Metagenomic hit (no protein accession): contig NFLV01000009.1 (Eubacterium sp. An11, from chicken gut metagenome)
MSKKQRPKDIRKRQEEEKREKYKKQEELRKKQEELRKEQEQRREDQKELEKIKKEVGEEGEKKKSRAKALGLKSTFILDRDEQKVLMTSFGQGNKAVRDKYIIGDKVSDINDDRKNKKAALLVEVCGKSFNISKKENDDCDPVKVNNPVVSRNKKDDDLIHCRKKLEELYFGEQFKDNIHIQLIYNILDIEKILAVQVNNIVFALNNLLSWSGEEKFDLIGYLGVNDTYEKFRDAKGKRKGLYEKFSTLIEKKRMRYFGSTFYPLNEKGEEITSNDKKEWEQFEKKCYHLLAVLGMMRQATAHGDSKRRAEIYKLGKEFDKSEARGCRQEARKELDDLYRKKIHEMNQSFLKNSKRDILMLFRIYDAESKEAKRKLAQEYYEFIMLKSYKNTGFSIKHLRETVIDKMDEDIKEKIKDDKYNPIRRKLYRIMDFVIYQYYQESEQQEEAMELVRKLRNAETKVEKELTYRKEAEKLKEELEKIIRNSILSVCDRILAEMNEKRHKKVNQESSDTDSEEPLDPEISEGITFIKETAHSFSEMIYLLTVFLDGKEINILLTQLIHCFDNISSFMDTMKEENLLTKLKEDYEIFEESKEISKELRIINSFARMTEPVPKTEKTMFIDAAQILGYSNDEKELEGYVDALLDTKNKTKDKERKGFEKYIWNNVIKSTRFRYLVRYADPKKVRAFAANKKVVAFVLKDIPDEQIKAYYNSCFSQNSDSSSNMSIAFQDGDSNKKGTSVHDMMRKALTEKITGLNFGDFEEESKKGIRREESDKNIIRLYLTVLYLVQKNLIYVNSRYFLAFHCAERDEVLYNGETIDNNKEKGSEKDWKKFAKEFIIEHPPKKKVKDYLAKNFEYSNKWSLRVFRNSVQHLNVIRDAYKYIKCIDDNKDVQSYFALYHYLVQRYISEMAENLTDKGELSEGRLQYYLSQVENYRTYCKDFVKALNVPFAYNLPRYKNLSIDELFDRNNYLPNKAKKWISEKKENGEYVMEDCGNKGAGQVENA

SEQ ID NO: 169 - DNA, 35 bp, Artificial Sequence
  DR
gaactacaccctggctgaaagtcagggtctaaaac

SEQ ID NO: 170 - protein, 1027 aa, Artificial Sequence
  Metagenomic hit (no protein accession): from contig emb|OBLI01020244 and emb|OBLI01038679 (from pig gut metagenome)
MAKKITAKQRREERERQNKQKWAKKQADATAVFECEADIKPADSKDEDCTNIYIKREKKKTQAKAMGLKTVLGFDNKIAIASFMSSKDSKSSHIERITDPNGKTIREDVRMFDSNVDECSINLEKRMTVEERQKDGTIKKDEKDVKSTICNPYSNECGKDYIGIKSVAEELFFGRTFPNDNLRVQIAYNIFDIQKILGTYINNIIYSFYNLSRDESQSDNDVIGTLYMLKDFDGQKETDTFRQARALLERTEAYYSYFDNVFKKIDKNKKKSDDCKRERNEILRYNFNVLRVLSFLRQICAHAQVKISNEHDREKGGGLVDSLDALFNISRFFDAVAPELNEVINSVYSKGIDDINDNFVKNGKNNFYILSKIYPEVAREDLLREYYYFVVSKEGNNIGISTKKLKEAIIVQDMSYIKSEDYDTYRNKLYTVLCFILVKELNERTTIREQMVADLRANMNGDIGREDIYSKYAKIIYAQVKPRFDTMKSAFEEEAKDVIVPDKKKPVKFSHGKLDKNEIERFCITSANTDSVAKIIYFLCKFLDGKEINELCCAMMNKLDGINDLIETAEQCGAKVEFVDKFSVLSNCETISDQIRIVKSISKMKKEIAIDNDTIFLDALELLGRKIDKYKKDATGKYLKDENGKYLYSKEYDDFQYMFFKDSHRVRNFISNSVIKSKWFSYIVRYNQPSECRAIMKNKTLVKFALDELPDLQIQRYFVALYGDEDLPSYGEMRKILLKKLHDFSIKGFLDEIVLLSDLDMESQDKYCEKEQKKSLFRLYLTIAYLITKSMVKINTRFSIACATYERDYALLCASNKQERAWSSGATALALTRRFLNQDKLIFEKHYAREGEISKLPKEERKAMRKVNDQLLKRTHFSKHSYCYIVDNVNRLTGGECRTDKRVLPVLNEKNDNAGILLDFRKTIAHLNVVHKMVDYVDEIKGITSYYAFFCYVLQRMLVGNNLNEKNAIKEKYSATVKSFGTYSKDFMWLINLPFAYNLPRYKNLSNEQLFYDEEERNETEEQIDRL

SEQ ID NO: 171 - protein, 39 aa, Artificial Sequence
  Motif 1
  MISC_FEATURE (3)..(3): Xaa can be Ile, Met, or Val
  misc_feature (4)..(4): Xaa can be any naturally occurring amino acid
  MISC_FEATURE (5)..(5): Xaa can be Asn or Ser
  misc_feature (6)..(7): Xaa can be any naturally occurring amino acid
  misc_feature (9)..(9): Xaa can be any naturally occurring amino acid
  misc_feature (11)..(11): Xaa can be any naturally occurring amino acid
  MISC_FEATURE (12)..(12): Xaa can be Ala, Ile, Leu, or Val
  MISC_FEATURE (13)..(13): Xaa can be Lys or Arg
  MISC_FEATURE (14)..(14): Xaa can be Phe, His, or Tyr
  misc_feature (15)..(16): Xaa can be any naturally occurring amino acid
  MISC_FEATURE (17)..(17): Xaa can be Ala, Pro, or Thr
  misc_feature (18)..(25): Xaa can be any naturally occurring amino acid
  MISC_FEATURE (26)..(26): Xaa can be Cys or Asn
  misc_feature (27)..(31): Xaa can be any naturally occurring amino acid
  MISC_FEATURE (32)..(32): Xaa can be Phe or Leu
  misc_feature (33)..(33): Xaa can be any naturally occurring amino acid
  misc_feature (35)..(36): Xaa can be any naturally occurring amino acid
  MISC_FEATURE (37)..(37): Xaa can be Ile, Leu, Met, or Val
  MISC_FEATURE (38)..(38): Xaa can be Ala, Gly, or Pro
  MISC_FEATURE (39)..(39): Xaa can be Asp, Glu, or Lys
NVXXXXXFXYXXXXXXXXXXXXXXXXXXXXXXXLXXXXX

SEQ ID NO: 172 - protein, 33 aa, Artificial Sequence
  Motif 2
  misc_feature (2)..(2): Xaa can be any naturally occurring amino acid
  MISC_FEATURE (3)..(3): Xaa can be Phe or Leu
  misc_feature (4)..(4): Xaa can be any naturally occurring amino acid
  MISC_FEATURE (5)..(5): Xaa can be Ile or Val
  misc_feature (6)..(6): Xaa can be any naturally occurring amino acid
  misc_feature (8)..(10): Xaa can be any naturally occurring amino acid
  MISC_FEATURE (12)..(12): Xaa can be Asn or Ser
  MISC_FEATURE (13)..(13): Xaa can be Ile, Leu, or Met
  MISC_FEATURE (14)..(14): Xaa can be Ile or Val
  misc_feature (15)..(16): Xaa can be any naturally occurring amino acid
  MISC_FEATURE (18)..(18): Xaa can be Ala, Gly, Ser, or Thr
  misc_feature (19)..(19): Xaa can be any naturally occurring amino acid
  MISC_FEATURE (20)..(20): Xaa can be Phe or Tyr
  misc_feature (21)..(22): Xaa can be any naturally occurring amino acid
  MISC_FEATURE (23)..(23): Xaa can be Ala or Gly
  misc_feature (24)..(27): Xaa can be any naturally occurring amino acid
  MISC_FEATURE (28)..(28): Xaa can be Asp or Glu
  misc_feature (31)..(32): Xaa can be any naturally occurring amino acid
  MISC_FEATURE (33)..(33): Xaa can be Phe, Leu, or Met
LXXXXXYXXXKXXXXXNXXXXXXXXXXXRDXXX

SEQ ID NO: 173 - protein, 19 aa, Artificial Sequence
  Motif 3
  misc_feature (5)..(5): Xaa can be any naturally occurring amino acid
  MISC_FEATURE (6)..(6): Xaa can be Leu or Met
  misc_feature (7)..(7): Xaa can be any naturally occurring amino acid
  MISC_FEATURE (8)..(8): Xaa can be Cys, Ser, or Thr
  MISC_FEATURE (9)..(9): Xaa can be Ala, Asn, Gln, Ser, or Thr
  MISC_FEATURE (10)..(10): Xaa can be Ile, Leu, or Met
  MISC_FEATURE (11)..(11): Xaa can be Ile, Met, or Val
  misc_feature (12)..(13): Xaa can be any naturally occurring amino acid
  MISC_FEATURE (14)..(14): Xaa can be Phe or Leu
  MISC_FEATURE (15)..(15): Xaa can be Ala, Asp, Glu, or Gln
  MISC_FEATURE (16)..(16): Xaa can be Gly, Asn, or Val
  misc_feature (18)..(18): Xaa can be any naturally occurring amino acid
  MISC_FEATURE (19)..(19): Xaa can be Asp, Glu, Asn, or Ser
KEINXXXXXXXXXXXXIXX

SEQ ID NO: 174 - protein, 18 aa, Artificial Sequence
  Motif 4
  MISC_FEATURE (3)..(3): Xaa can be Ala or Gly
  MISC_FEATURE (5)..(5): Xaa can be Cys, Asp, Asn, or Val
  misc_feature (6)..(6): Xaa can be any naturally occurring amino acid
  MISC_FEATURE (7)..(7): Xaa can be Ala, Pro, or Val
  MISC_FEATURE (9)..(9): Xaa can be Phe or Tyr
  misc_feature (10)..(10): Xaa can be any naturally occurring amino acid
  MISC_FEATURE (11)..(11): Xaa can be Asp or Asn
  MISC_FEATURE (13)..(13): Xaa can be Ser or Thr
  misc_feature (14)..(17): Xaa can be any naturally occurring amino acid
PFXYXXXRXXXLXXXXXF

SEQ ID NO: 175 - protein, 979 aa, Artificial Sequence
  Metagenomic hit (no protein accession):  contig OJMM01002900 human gut metagenome sequence
MGKHLNAKQRKLEKKLKNQQKDMMYTKSTDAVSVPTLKAAPTKAEMSQDTAEASTLITPGTLKTKAKAMGLKSTLVFDDKIVVTSFLNSKTEENEKCAHIEKIADCNGQTIVERPRMFNTSINAKKVDLSKDNDETNYPNPAFEDCGRDYINVKSALEKRVFGKTYNKDNLHVQIAYNIFDIKKIIGAYINNIIYIFYNLGREEYDAKKDIIGTQDSAYISKILNNTSAYFTYFDGVFKQITDRDSNKDREIKNSYNALVLKVLYYLRQFCMHGNTYTKRNEESFLSDTALYNAKEFFAKADPQINELIDAVYADGIKTINSDFMAHAKNNMYIICEVYKNEAEDSLMKEYYDFVVRKEGNNLGFNTRQLREILIDKYVGNLRGKKYNTFRNKLYTVLGFILVKEIKRNPKIQDSFIAKLRANQNGDEGKLNIYNEFAPKIWSVVSSKLNSAITCFDEESLSKFKGYKDIDESLISRYGITVANTDTLVKILYFLCKFLDGKEINELCCAMINKFDNINDLIKTAAQCGEDIEFVKEYKLFINSNDLSDQIRIVKSISKMKPELSKIGEALILDAIDILGYKINKYKYDAAGNRLVDSNNKPVYSEEYCAFKKDFFETCELDEFGRVKYNKKGKPVINHRRRNFIINNVLSSKWFFYVAKYNRPSECQKFMKSKKLIALVLKDVPETQIARYYQSVTGGRTQANSEAMRMTLIKLLHEFSIKNVLSDVGTMTASENKRQIENSRKERMKAIVKLYLTVVYLIAKSLVKVNTRFSIAFSAYERDVSLLADENELIALANNEDDKWKKGNYVFALTKHFWDNDEPYFDKYNNALQQIRSIVDPNERRLAYRANDKVVKHTHFNLHSYKYVKHNYEEISKASKIITAYRNNVQHLNVMNSITKYLGDISEVTSYYSLYCYTLQRLLLDDNNNDKFASIKGNLRKFGIYNKDFMWLLNIPFAYNLPRYKNLSNEEIFYDELQK

SEQ ID NO: 176 - DNA, 36 bp, Artificial Sequence
  Direct repeat
gtacaatagccctctcgtagttgagggctctgagac

SEQ ID NO: 177 - protein, 1009 aa, Artificial Sequence
  Metagenomic hit (no protein accession):  contig ODAI011611274.1 gut metagenome sequence
MKKKISLKEQRNTKKAENKLKYQKAQAERAAAAQQTAAGAESEENPCFDVVKDTKRKALNPLHVEIEAPSAKKSSVKANGLKSLLLTDGKTVMTSFGRGSEANVEKRFDETGTKTFDRDPELFSAKPLETGYRIQRFNASPKDAGLAYRPAGVRPDQIGAKAALEKRYFGKETPGDNIHVQIAYQIQDIEKLLAVYISNIIYAVNNVTGVSAMKDSKGRPVDLLGDYGILGEEGLTKRLQRIPEQADEEAKALQAFLCSERLSYFGKEFCLVRNSPKQPDKEEKRQYKLMRVLCLLGELRQFLVHGKKKEKEFAWLYRLDRQLSQEYRKLLGEFYDAQVDKVNKSFLTNSTVNLEVLFRALKTGTDPERKTVTQEYYQFTVRKEDGNLGFSLKTLREILLSAYKHEVRDKEYDSIRHKLYQLFSFALYHYYKTGVGAERREAFVAKLRAVMTAEAKQRAYADEAAEIWNDEGSGIRAAFLEILEAVDFGSAVKGIKARSSVAGDKRFAEWLEEVRIRPEGVSCFTKLMYLLTRFLDGKEINELLTGLINKLENIQSFLDVMQQEHAETGLSDAFSFFEYSGEIAAELRMTRSFARMAAADPEAKRFMVVDGAKLLGFNPKDTESEDEGIIRAIYGDACAEYLQFSEEEKEAFYVQEGLYGKEREKFSPYAYFHTDTSLRNFIAKNVVESARFRYVIRYVSPEIARKYARQEALVRFALHRVPLLQLRRYYQSCCGPKKDPDAAECVDFLAGVVNRVDFANFTDVRTGDSSKSEQEKKQKYQAIVGLYLTVVYWIVKNLVNVNSRYVMAFHILERDTVLLEGKRLFVGGMKAEDPFLLTDGYVSRQDAYVRKRIGENKRANRHGLNCVLENRNALGSDPASTDAAASLIWSYRNAAAHLTAVAAAQEYVSELREIHSYFEVYHYAMQRYLKSGAEFAELVSKNGPASGKIAAWANAVDRCHSFCKDWLWLLNVPFAYNPARYKNLSIANLFDKNEAAPVTEDASEQKEDE

SEQ ID NO: 178 - DNA, 36 bp, Artificial Sequence
  Direct repeat
gtactacacccctgcagttttgcaggggtctgaaac

SEQ ID NO: 179 - protein, 961 aa, Artificial Sequence
  Metagenomic hit (no protein accession):  contig OIZX01000427.1
MAKKKKTARQLREEMQQQRKQAIQKQQEQRQEKAAAARETAAPEQPAAAPVPKRQRKSLAKAAGLKSNFILDPQRRTTVMTAFGQGSTAILEKQIVDRAISDLQPVQQFQVEPASAAKYRLKNSRVRFPNVTADDPLYRRKDGGFVPGMDALRRKNVLEQRFFGKSFADNIHIQMIYSILDIHKILAAASGHIVHLLNIVNGSKDRDFIGMLAAHVLYNELNEEAKRSIADFCKSPRLIYYSAAFYETLDNGKSERRSNEDIFNILALMTCLRNFSSHHSIAIKVKDYSAAGLYNLRRLGPDMKKMLDTFYTEAFIQLNQSFQDHNTTNLTCLFDILNISDSARQKQLAEEFYRYVVFKEQKNLGFSVRKLREEMLLLPDAAVIADKRYDTCRSKLYNLMDFLILRVYRTGRADRCDKLPEALRAALTDEEKAVVYHKEALSLWNEMRTLILDGLLPQMTPENLSRLSGQKRKGELSLDDAMLKECLYEPGPVPEDAAPEEANAEYFCRMIYLATLFMDGKEINTLLTTLISKFENIAAFLQTMEQLNIEAELGPEYAMFTRSRAVAEQLRVINSFALMKKPQVNAKQQLYRAAVTLLGTEDPDGVTDEMLCIDPVTGKMLPPNQRHHGDTGLRNFIANNVVESRRFQYLIRYSDPAQLHQLASNKKLVRFVLSSIPDTQINRYYETCGQTRLAGRAAKVEFLTDMIAAIRFDQFRDVNQKERGANTQKERYKAMLGLYQTVLYLAVKNLVNINARYVMAFHCVERDMFLYDGELTDPKGESVSAFLAVNGKKGVQPQYLLLTQLFIRRDYLKRSACEQIQHNMENISDRLLREYRNAVAHLNVIAHLADYSADMREITSYYGLYHYLMQRHLFKRHAWQIRQPERPTEEEQKLIEQEQKQLAWEKALFDKTLQYHSYNKDLVKALNAPFGYNLARYKNLSIEPLFSKEAAPAAEIKATHA

SEQ ID NO: 180 - DNA, 36 bp, Artificial Sequence
  Direct repeat
actatagccctgccggaaatgacagggttctacaac

SEQ ID NO: 181 - protein, 963 aa, Artificial Sequence
  Metagenomic hit (no protein accession):  contig emb|OCVV012889144.1|
MSKNKESYAKGMGLKSALVSGSKVYMTSFEGGNDAKLEKVVENSEIVSLAEKESFSAEIFKKNIGCKIENKKFKHPKRYDVIADNPLYKGSVRQDMLGLKETLEKRYFNSADGTDNVCIQVIHNILDIEKILAEYITNAVYSFDNIAGFGEDIIGMGGFKPIYTYKQFKEPDKYNKKFDDILNNSRLGYYGKAFFEKNDLKHNPNKKKRDKNPYILKYDNECYYIIALLSGLRHWNIHSHAKDDLVSYRWLYNLDSILNREYISTLNYLYDDIADELTESFSKNSSANVNYIAETLNIDPSEFAQQYFRFSIMKEQKNMGFNVSKLREIMLDRKELSDIRDNHRVFDSIRSKLYTMMDFVIYRYYIEEAAKTEAENRNLPENEKKISEKDFFVINLRGSFDENQKEKLYIEEAKRLWEKLKDIMLKIKEFRGEKVKEYKKEVPRIERILPQGKDISAFSKLMYMLSMFLDGKEINDLFTTLINKFDNIQCFLKIMPLIGVNVKFTEDYAFFNKSEKIADELRLIKSFARMGEPVANTKRVMMIDAVKILGTDLSDDELVNMADSFFNDSEGNLLKKGKHGMRNFIINNVIENKRFHYLIRYGDPAHLHEIAKNEAVVRFVLGRIADIQKKQGKDGKNQIDRYYEICVGKDRGKTVSQKLDELTKIIVNMNYDQFEQKKEIIENTRTKTKYMRYDEEQKLRKDNAEREKFKKIISLYLTVLYYVVKNIVNINSRYVIGFHCLERDAQLYSEKYNKEIDKKISSLTKFCLGESDEKKLKALAKKSLEELKTTNSKLYENYIKYSDERKAEEAKRQINRERAKTAMNAHLRNTKWNDIMYGQLKDLADSKSRICSEFRNKAAHLEVARYAHMYINDISEVKSYFRLYHYIMQRRIIDVIENNPKAKYEGKVKVYFEDVKKNKKYNKNLLKLMCVPFGYCIPRFKNLSIEQMFDMNETDNSDKKKEK

SEQ ID NO: 182 - DNA, 36 bp, Artificial Sequence
  Direct repeat
catatacaaccccgtaaagttacggggttctgaaac

SEQ ID NO: 183 - protein, 911 aa, Artificial Sequence
  Metagenomic hit (no protein accession):  contig OCTW011587266.1
MKQNDRENNNKIKKSAAKAVGVKSLARLSDGSTVVSSFGKGAAAELESLITGGEIRKLSDKAILEITDDTQNKNAYNVKSSRIPNLTARTDKLSDKSGMDDLGFKRELELEVFGQCFDDSIHIQIAHAVFDIQKSLAAVIPNVLYTLNNLDRSYSTDNTSDKKDIIGNTLNYQHSYESFNVEKRGEFTEYYNAAKDRFSYFPDILCVLEKVNGKDRYQPKSEKDAFNVLSSVNMLRNSLFHFAPKSNDGKARIAVFKNQFDSDFSHITSTVNKIYSAKIAGVNENFLNNEGNNLYIILKATNWDIKKIVPQLYRFSVLKSDKNMGFNMRKLREFAVESKNIDLSRLNDKFLTNNRKKLYKVIDFIIYYHLNKVLKDSFVDDFVAALRASQSEEEKEKLYAQYSERLFADEGLKSAIKKAVDMISDTKSNIFKMKTPLDKALIENIKVNSDASDFCKLIYVFTRFLDGKEINILLNSLIKKFQDIHSFNTTVKKLSENNLIINADYVDDYSLFEQSGTVARELMLIKSISKMDFGLDNINLSFMYDDALRTLGVSDENLPEVKREYFGKTKNLSAYIRNNVLENRRFKYVIKYIHPSDVQKIACNKAIAGFVLNRMPDTQIKRYYDSLINKGATDIQAQAKALLDCITGISFDAIKDDKHLHKSKEKSPQRSADRERKKAMLTLYYTIVYIFVKQMLHINSLYTIGFFYLERDQRFIYSRAKKENKNPSKNSYLNDFRSVTAYFIPSEIMKRIEKNENKGFLEDFEALWNSCGKTSRLRKEDVLLYARYISPDHALKNYKMILNSYRNKIAHINVIMSAGKYTGGIKRMDSYFSVFQHLVQCDILSNPNNKGKCFESESLKPLLLDMKFDGTDEKLYSKRLTRALNIPFGYNVPRYKNLTFEKIYLKSSINE

SEQ ID NO: 184 - DNA, 36 bp, Artificial Sequence
  Direct repeat
cttatacaacacccattttcacagtgggtctataac

SEQ ID NO: 185 - protein, 904 aa, Artificial Sequence
  Metagenomic hit (no protein accession):  contig emb|OGNF01009141.1
MADIDKKKSSAKAAGLKSTFVLENNKLLMTSFGNGNKAVIEKIIDEKVDSINEPEVFSVTPCDKKFELQPAKRGLAADSLVDNPLKSKKTAGDDAIHSRKFLERQFFDGNTFNDNIHIQLIYNILDIEKILSVHVNDIVYSVNNILSRGEGMEYNDYIGTLNLKSFETYKNNLVNKKKFDLDRVKKIPQLAYFGSAFYNTPEDTSAKITKTKIKSNEEIYYTFMLLSTARNFSAHYLDRNRAKSSDAEDFDGTSVIMYNLDNEELYKKLYNKKVHMALTGMKKVLDANFNKKVEHLNNSFIKNSAKDFVILCEVLGIKSRDEKTKFVKDYYDFVVRKNYKHLGFSVKELRELLFANHDSNKYIKEFDKISNKKFDSVRSRLNRLADYIIYDYYNKNNAKVSDLVKYLRAAADDEQKKKIYLNESINLVKSGILERIKKILPKLNGKIIGNMQPDSTITASMLHNTGKDWHPISENAHYFTKWIYTLTLFMDGKEINDLVTTLINKFDNIASFIEVLKSQSVCTHFSEERKMFIDSAEICSELSAMNSFARMEAPGASSKRAMFVEAARILGDNRSKEELEEYFDTLFDKSASKKEKGFRNFIRNNVVDSNRFKYLTRYTDTSSVKAFSNNKALVKFAIKDIPQEQILRYYNSCFGASERYYNDGMSDKLVEAIGKINLMQFNGVIQQADRNMLPEEKKKANAQKEKYKSIIRLYLTVCYLFFKNLVYVNSRYYSAFYNLEKDRSLFEINGELKPTGKFDEGHYTGLVKLFIDNGWINPRASAYLTVNLANSDETAIRTFRNTAEHLEALRNADKYLNDLKQFDSYFEIYHYITQRNIKEKCEMLKEQTVKYNNDLLKYHGYSKDFVKALCVPFGYNLPRFKNLSIDALFDKNDKREKLKKGFED

SEQ ID NO: 186 - DNA, 36 bp, Artificial Sequence; identical to SEQ ID NO: 159
  Direct repeat

SEQ ID NO: 187 - protein, 933 aa, Artificial Sequence
  Metagenomic hit (no protein accession):  contig emb|OIEN01002196.1|
MERQKRKMKSKSKMAGVKSVFVIGDELLMTSFGDGDDAVLEKDIDENGVVNDCRNPAAYDAVYGTDSIRVKKTNNNIRAKVNNPLAKSNIRSEESALFRTRVNEYKREQKDKYETLFFGKTFDDNIHIQLISKILDIEKTFSVVIGNIVYAINNLSLEQSIDRPIDIFGDKNTQGISLREDNDYLKTMLPRCEYLFHNILNSDSDNNSKMNYNKVNKGKEEKDNRNNENIEKLKKALEVIKIIRVDSFHGVDGIKGDQKFPRSKYNLAVNYNEEIQKTISEPFNRKVEEVQQDFYRNSCVNIDFLKEIMYGSNYTDRGSDSLECSYFNFAILKQNKNMGFSITSIRECLLDLYELNFESMQNLRPRANSFCDFLIYDYYCKNESERANLVDCLRSAASEEEKKNIYFQTAERVKEKFRNAFNRISRFDASYIKNSREKNLSGGSSLPKYSFIEGFTKRSKKINDNDEKNADLFCNMLYYLAQFLDGKEINIFLTSIHNIFQNIDSFLKVMKEKGMECKFQKDFKMFSHAGHVAKKIEIVISLAKMKKTLDFYNAQALKDAVTILGVSKKHQYLDMNSYLDFYMFDNRSGATGKNAGKDHNLRNFLVSNVIRSRKFNYLSRYSNLAEVKKLAQNPSLVQFVLSRIEPSLICRYYESSQGISSEGITIDEQIKKLTGIIVDMNIDSFENINNGEIGMRYSKATPQSIERRNQMRVCVGLYLNVLYQIEKNLMNVNARYVLAFAFAERDALMLNFTLEECKKNKKRSSGGFSFIEMTQFFIDKKLFKVATEAIKKNVLKYNGNPESLNHIPGEYICKNMEGYHENTVRNFRNMVAHLTAVARVPLYISEVTQIDSYYALYHYCMQMNILQGIEQSGKILDNIKLKNALENARVHRTYSKDAVKYLCLPFAYNISRYKALTIKDLFDWTEYSCKKDE

SEQ ID NO: 188 - DNA, 36 bp, Artificial Sequence
  Direct repeat
gccccttgaccttacgaaatggtaaggttccaaaac

SEQ ID NO: 189 - protein, 1034 aa, Artificial Sequence
  Metagenomic hit (no protein accession):  contig e-k87_11092736
MKRQKTFAKRIGIKSTVAYGQGKYAITTFGKGSKAEIAVRSADPPEETLPTESDATLSIHAKFAKAGRDGREFKCGDVDETRIHTSRSEYESLISNPAESPREDYLGLKGTLERKFFGDEYPKDNLRIQIIYSILDIQKILGLYVEDILHFVDGLQDEPEDLVGLGLGDEKMQKLLSKALPYMGFFGSTDVFKVTKKREERAAADEHNAKVFRALGAIRQKLAHFKWKESLAIFGANANMPIRFFQGATGGRQLWNDVIAPLWKKRIERVRKSFLSNSAKNLWVLYQVFKDDTDEKKKARARQYYHFSVLKEGKNLGFNLTKTREYFLDKFFPIFHSSAPDVKRKVDTFRSKFYAILDFIIYEASVSVANSGQMGKVAPWKGAIDNALVKLREAPDEEAKEKIYNVLAASIRNDSLFLRLKSACDKFGAEQNRPVFPNELRNNRDIRNVRSEWLEATQDVDAAAFVQLIAFLCNFLEGKEINELVTALIKKFEGIQALIDLLRNLEGVDSIRFENEFALFNDDKGNMAGRIARQLRLLASVGKMKPDMTDAKRVLYKSALEILGAPPDEVSDEWLAENILLDKSNNDYQKAKKTVNPFRNYIAKNVITSRSFYYLVRYAKPTAVRKLMSNPKIVRYVLKRLPEKQVASYYSAIWTQSESNSNEMVKLIEMIDRLTTEIAGFSFAVLKDKKDSIVSASRESRAVNLEVERLKKLTTLYMSIAYIAVKSLVKVNARYFIAYSALERDLYFFNEKYGEEFRLHFIPYELNGKTCQFEYLAILKYYLARDEETLKRKCEICEEIKVGCEKHKKNANPPYEYDQEWIDKKKALNSERKACERRLHFSTHWAQYATKRDENMAKHPQKWYDILASHYDELLALQATGWLATQARNDAEHLNPVNEFDVYIEDLRRYPEGTPKNKDYHIGSYFEIYHYIRQRAYLEEVLAKRKEYRDSGSFTDEQLDKLQKILDDIRARGSYDKNLLKLEYLPFAYNLPRYKNLTTEALFDDDSVSGKKRVAEWREREKTREAEREQRRQR

SEQ ID NO: 190 - DNA, 30 bp, Artificial Sequence
  Direct repeat 1
gtgagaagtctccttatggggagatgctac

SEQ ID NO: 191 - DNA, 30 bp, Artificial Sequence
  Direct repeat 2
gtagcatctccccataaggagacttctcac

SEQ ID NO: 192 - DNA, 36 bp, Artificial Sequence
  Direct repeat 3
gctagggcttgtaggaattccttgctatggtacaat

SEQ ID NO: 193 - DNA, 36 bp, Artificial Sequence
  Direct repeat 4
attgtaccatagcaaggaattcctacaagccctagc

SEQ ID NO: 194 - protein, 116 aa, Artificial Sequence
  Gut_metagenome_contig6893000291
MYPFINFAIFRYYNVYHKEADYLVDSLRASMNEVEKDAVYRREAVRIWPRLKKLILNHILPEMTGSKIKEKDAKPDPEMDASMIDSVKIGTESTLFTKIIFLTTLFLNGKETNDLI

SEQ ID NO: 195 - protein, 30 aa, Artificial Sequence
  Artificial sequence
  misc_feature (2)..(6): Xaa can be any naturally occurring amino acid
  MISC_FEATURE (7)..(7): Xaa can be Phe, Trp, or Tyr
  misc_feature (8)..(10): Xaa can be any naturally occurring amino acid
  MISC_FEATURE (12)..(12): Xaa can be Asn, Gln, or Ser
  MISC_FEATURE (13)..(13): Xaa can be Ile, Leu, or Met
  MISC_FEATURE (14)..(14): Xaa can be Ile, Leu, Met, or Val
  misc_feature (15)..(16): Xaa can be any naturally occurring amino acid
  misc_feature (18)..(19): Xaa can be any naturally occurring amino acid
  MISC_FEATURE (20)..(20): Xaa can be Phe, Trp, or Tyr
  misc_feature (21)..(22): Xaa can be any naturally occurring amino acid
  MISC_FEATURE (23)..(23): Xaa can be Ala or Gly
  misc_feature (24)..(27): Xaa can be any naturally occurring amino acid
  MISC_FEATURE (28)..(28): Xaa can be Asp or Glu
  misc_feature (29)..(29): Xaa can be any naturally occurring amino acid
LXXXXXXXXXKXXXXXNXXXXXXXXXXXXD

SEQ ID NO: 196 - protein, 18 aa, Artificial Sequence
  Artificial sequence
  MISC_FEATURE (1)..(1): Xaa can be Phe, Trp, or Tyr
  MISC_FEATURE (2)..(2): Xaa can be Ile, Leu, or Val
  misc_feature (3)..(4): Xaa can be any naturally occurring amino acid
  MISC_FEATURE (5)..(5): Xaa can be Asn, Gln, or Ser
  MISC_FEATURE (6)..(6): Xaa can be Ile, Leu, or Val
  misc_feature (7)..(8): Xaa can be any naturally occurring amino acid
  MISC_FEATURE (9)..(9): Xaa can be Asp, Asn, Ser, or Thr
  misc_feature (10)..(11): Xaa can be any naturally occurring amino acid
  misc_feature (13)..(13): Xaa can be any naturally occurring amino acid
  misc_feature (15)..(16): Xaa can be any naturally occurring amino acid
  MISC_FEATURE (17)..(17): Xaa can be His, Lys, or Arg
  MISC_FEATURE (18)..(18): Xaa can be Phe, His, or Tyr
XXXXXXXXXXXFXYXXXX

SEQ ID NO: 197 - protein, 15 aa, Artificial Sequence
  Artificial sequence
  MISC_FEATURE (2)..(2): Xaa can be Cys, Asp, Asn, Ser, or Val
  misc_feature (3)..(4): Xaa can be any naturally occurring amino acid
  MISC_FEATURE (6)..(6): Xaa can be Phe, Trp, or Tyr
  misc_feature (7)..(7): Xaa can be any naturally occurring amino acid
  MISC_FEATURE (8)..(8): Xaa can be Ala, Asp, Asn, or Thr
  MISC_FEATURE (9)..(9): Xaa can be Leu or Met
  MISC_FEATURE (10)..(10): Xaa can be Ser or Thr
  misc_feature (11)..(14): Xaa can be any naturally occurring amino acid
  MISC_FEATURE (15)..(15): Xaa can be Phe, Trp, or Tyr
YXXXRXXXXXXXXXX

SEQ ID NO: 198 - protein, 940 aa, Artificial Sequence
  Ga0224415_10007274
MIEKKKSYAKGMGLKSTIVSGSKVYMTTFGDGSEARLEKVVENDSIKTLHEGEAFSAEMTDNNAGYKIGNVKFSHPNGYDVVANNPFYTGPVQQDMLGLKEILERRYFGSSTDGNNTICIQIIHNILDIEKILAEYITNAVYATNNIIDPDNDVIGGKKFTSIKTFAQFSASDSSNDFEQFLKNPRLGYLGKAFFYKDGKRNNRQKDPIECYHLLALLCGLRNWVVHNNEEKDLIKYTWLYNLDKYLDAEYITTLNYMYNDIGDELTDSFSKNSAANINYIAETLGIDPKTFAEQYFRFSIMKEQKNLGFNLTKLREVMLDRKDMSEIRENHNDFDSIRAKVYTMMDFVIYRYYIEEAAKVNAANKSLPDNEKSLSEKDIFVISLRGSFNEDQKDRLYYDEAQRLWSKVGKLMLKIKKFRGKDTRKYKNMGTPRIRRLIPEGRDISTFSKLMYALTMFLDGKEINDLLTTLINKFDNIQSFLKVMPLIGVNAKFAEEYSFFNNSEKIADELRLIKSFARMGEPVADARRAMYIDAIRILGTDLSDDELKALADSFSLDENGNKLGKGKHGMRNFIINNVITNKRFHYLIRYGNPVHLHEIAKNEAVVKFVLGRIADIQKKQGQNGKNQIDRYYETCIGKDSSKSVAEKVNALTKIITGMNYDQFDSRRNVIENTGAGNAEREKYKKIISLYLTVIYHILKNIVNINSRYVIGFHCVERDAQLYKEKGYDINLKKLKDKGFTSVTKLCAGIDEECKDVEKEMTERAKASFAALETANPKLYATYINYSDEEKNAELRKQINREKAKTALNAHLRNTKWNVIIREDLLRRDNKACKIFRNKVAHLEAIRYAHLYINDIAEVNSYFQFYHYIMQRRIMAERYDKSSGKVREYFDAVNNEKKYNDRLLKLLCVPFGYCIPRFKNLSIEALFDMNEAVKFDKEKK

SEQ ID NO: 199 - DNA, 36 bp, Artificial Sequence
  DR
caagtaaacccctaccaagtggtcggggtttgaaac

SEQ ID NO: 200 - protein, 1057 aa, Artificial Sequence
  EMG_10003641
MEETKVTKETTIEKQSTKRHKQKSKKTATKMSGLKSALVINNHEMLLTSFGKGNNAIAEKRYILDGDIETINNKNKKFDANNDSKVVVIKGISNPNGQLTNPLFDQSPTAIQPNRTSGNDMIGIRRMLERKYFVHNEENKEFQDNIRIQIAYCILDIEKILMPHINNICFEINNMLRLEGYQEDSFMGSFNLYKPYDAFIATTDDKESSRRDNFAKLMTSKQVRYLGNALYSDSLSNLTKDEILDGKRSKELKKYYQELCLLGMVRQSMIHSNQFNSSIYTLDSSYDSTMNTAELLGKGDDSSLVALATDARVEARAILDEIYKKGVDSINNSFLSNSINDLENLFKIYKCDSSEKKTELIKQYYDFCIRKPQMNMGFSITTIREGMFTRCSEANTLLLCDEGSTVKLNVHDTMKSKFYKNLDFMIYKYYKYENPEKGEKLIEDLRSKIKGKKKEDEDKKQRYAEESACILKAKRDIIKKDLTEAANKDLFADLVKSNKNEKQKFKNEYEELLKPFMIPVKVDYFSELIYLVTRFLSGKEINDLLTQLINKFENIAAFIRMYQNDQGKLEFTANYKMFEIDPQKDIPKDGKRVLSGSAKIAYYLRTINYIARMESFEIKSDKTAINDAISLLGYNSNEHRDEFITYTMAKHVVDKYQNTDYQKIVKDFLSANKTLDCKSKNMQAFVSELKNAHLSENYEQREKEIYELADTNLPAYFSEEDKEKLARYIVHSDGTYKKFLKESFYAIEELPNEGFRNFISNNVINSRRFNYIMRFCNPEKIANIGKNKVLISFALSSLAEKTDMIAKYYRVFCDRIDDQKTMEDYLVNKLTKISYTEFLNVNQKANAEKNKEKDRSQKLIGLYITLLYEIVKNLVNINSRYNIAFQRCDNDSIMILQGQYDERAVQESKLTKKFISNQKLNSYSCRYLTHNISQLDRCNDFIRQYRNKVAHLEVVSNIDEYLSGIKHIESYYALYHYLMQKCLLKNYRIEDHSQNEYKNLNDFSSKLDKHGTYVKDFVKALNVPFGYNLPRYKNLSIDELFDRNKLKTGGTIEMKGE

SEQ ID NO: 201 - DNA, 36 bp, Artificial Sequence
  DR
gaactacacccctgcagaaatgctggggtctgaaac

SEQ ID NO: 202 - protein, 973 aa, Artificial Sequence
  Ga0129306_1000735
MQKQREQQTVTDESERKKKPLKSGAKAAGLKSVFVLSEGKELLTSFGRGNEAVPEKRVTGGTIANARTDNKEAFSAALQNKRFEVFGRTAGSSDDPLAVSRAPGQDLIGAKTALEERYFGRAFADNIHMQVIYAIQDINKILAVHANNIVYTLNNLDREADPETDDFIGSGYLTLKNTFETYCDPAALNEREREKVTVSKQHFDAFMQNPRLAYYGNAFFRKLSKAERLARGREIFDKESPERRQEILGSRGKNKSVDDEIRALAPEWVKREERDVYSELVLMSELRQSCFHGQQKNSARIFRLDNDLGPGVDGARELLDRLYAEKINDLRSFDKTSASSNFRLLFNAYHADNEKKKELAQEFYRFSVLKVSKNTGFSIRTLREKIIEDHAAQYRDKIYDSMRKKLFSTFDFFLWRFYEEREDEAEELRACLRAARSDEEKEQIYAEAAASCWPSVKPFVESVAATLCDVVKGRTKLNKLKLSADESTLVRNAIDGVRISPRASYFTKLIYLMTLFLDGKEINDLLTTLIHAFENIDSFLSVLGSERLERTFDANYRIFADSGVIAQELRAVNSFARMTTEPFNSKLVMFEDAAQLFGMSGGLVEHAEELREYLDNKMLDKTKLRLLPDGKVDTGFRNFIISNVTESRRFRYLVRYCEPRAVRDYMSCRPLIRLTLRDMPDTILRRYYEQSVGAATVDRERILDTLADKLLSLRFTDFENVNQRANAERNREKQKMMGIISLYLNVAYQIVKNLVYVNARYTMAYHCAERDTELLLNAAGEGNLLRRDRSWPARLHLPRRALARRRDRVEVMERDVARGPEAYNRDEWLGLVRTLRREKRVCDNLHNNYAYLCGADAEPGDASLSLLFVYRNKAAHLSVLNKGGRLSGDLKEAKSWFYVYHFLMQRVLEEEFRNTQALPERLRELLMMAERYRGCSKDLIKVLNLTFAYNLPRYKNLSIDGRFDKNHPDPSDE

SEQ ID NO: 203 - DNA, 36 bp, Artificial Sequence
  DR
ccactacacccctgtcgaacaacgggggtctaaaac

SEQ ID NO: 204 - protein, 854 aa, Artificial Sequence
  Ga0129317_1008067
MKKQKKSLVKAAGLKSAFVVGDSVYLTSFGKGNAARLDTKINPDNSTERYVSDSEKHTLKINSITDTELRLSGPFPKQAEAKNPTHKKDNEQKNTRQDMLGLKSTLEKFYFGSTFDDNIHIQIIHNIQDIAKILAAHSNNAGYALDNMLAYQGVEFSDMIGYMGTSRTFDNYDPNHKNNKDFFRFLKLPRLGYFGSAFYSQKGKDFEKRSDEEVYNICALMGQIRQCCFHGKQEKYQLKWLYNFHNFKSNKPFLDTLDKHFDEMIDRINKNFIKNNTPDLIILSGLYPDMAKKELVRLFYDFTTVKEYKNMGFSVKKLREKMLESEEASDFRDKDYDSVRRKLYKLMDFCIYYLYYSDSERNENLVSRLRESLTDENKDIIYSKEAKIVWNELRKKFSTILDNVKGSNIKKLENVKEKFISEDEFDDIKLDIDISYFSKLMYVMCYFLDGKEINDLLTTLVSKFDNIGSIIEAATQIGINIEFIDDFKFFDRSKDISVELNIIRNFARMQAPVPNAKRAMQEDAIRILGGSEEDIFSILDDMTGYDKSGKKLAQSKKGFRNFIINNVVESSRFKYIVRYSNPQKIRKLANNSVVVGFVLGKLPDAQIESYFNSCLPNRVYSTPDKARESLRDMLHNISFNDFADVKQDDRRATPEEKVEKERYKAIIGLYLTVMYHLVKNLVYVNSRYVMAFHCLERDAMHYDVSLDNYRDLIRHLISEGDSSCNHFISHNRRMRDCIEENVKNSEQLIFGKEDAVIRFRNNVAHLSAIRNANEYIGDIREITSYFALYHYLMQRKLIDDCKVNDTAHKYFEQLTKYKTYVMDMVKALCSPFGYNLPRFKNLSIEGKFDMHESK

SEQ ID NO: 205 - DNA, 36 bp, Artificial Sequence
  DR
gaactacactactgtaattttgcagtagtctaaaac

SEQ ID NO: 206 - protein, 965 aa, Artificial Sequence
  Ga0224415_10048792
MSKKENRKSYVKGLGLKSTLVSDSKVYLTTFADGSNAKLEKCVENNKIICISNDKEAFAASIANKNVGYKIKNDEKFRHPKGYDIISNNPLLHNNSVQQDMLGLKNVLEKRYFGKSSGGDNNLCIQIIHNIIDIEKILSEYIPNVVYAFNNIAGFKDEHNNIIDIIGTQTYNSSYTYADFSKDKSDKKYIEFQKLLKNKRLGYWGKAFFTGQGNNAKVRQENQCFHIIALLISLRNWATHSNELDKHTKRTWLYKLDDTNILNAEYVKTLNYLYDTIADELTKSFSKNGAVNVNYLAKKYNIKDDLPGFSEQYFRFSIMKEQKNLGFNISKLRENMLDFKDMSVIRDDHNRYDKDRSKIYTMMDFVIYRYYIDNNNDSIDFINKLRSSIDEKSKEKLYNEEANRLWNKLKEYMLYIKEFNGKLASRTPDRDGNISEFVESLPKIHRLLPRGQKISNFSKLMYLLTMFLDGKEINDLLTTLINKFENIQGFLDIMPEINVNAKFEPEYVFFNKSHEIAGELKLIKGFAQMGEPAATLKLEMTADAIKILGTEKEDAELIKLAESLFKDENGKLLGNKQHGMRNFIGNNVIKSKRFHYLIRYGDPAHLHKIATNKNVVRFVLGRIADMQKKQGQKGKNQIDRYYEVCVGNKDIKKTIEEKIDALTDIIVNMNYDQFEKKKAVIENQNRGKTFEEKNKYKRDNAEREKFKKIISLYLTVIYHILKNIVNVNSRYILGFHCLERDKQLYIEKYNKDKLDGFVALTKFCLGDEERFEDLKAKAQASIQALETANPKLYAKYMNYSDEEKKEEFKKQLNRERVKNARNAYLKNIKNYIMIRLQLRDQTDSSGYLCGEFRDKVAHLEVARHAHEYIGNIKEVNSYFQLYHYIMQCRLYDVLKNNTKAEAMVKGKAKEYFEALEKEGTYNDKLLKIACVPFGYCIPRYKNLSMEELFDMNEEKKFKKKAPENT

SEQ ID NO: 207 - DNA, 36 bp, Artificial Sequence
  DR
caagtaaacccctaccaaatgtaaggggtttgaaac

SEQ ID NO: 208 - protein, 1022 aa, Artificial Sequence
  160582958 _gene49834
MKNSVTFKLIQAQENKEAARKKAKDIAEQARIAKRNGVVKKEENRINRIQIEIQTQKKSNTQNAYHLKSLAKAAGVKSVFAIGNDLLMTGFGPGNDATIEKRVFQNRAIETLSSPEQYSAEFQNKQFKIKGNIKVLNHSTQKMEEIQTELQDNYNRPHFDLLGCKNVLEQKYFGRTFSDNIHVQIAYNIMDIEKLLTPYINNIIYTLNELMRDNSKDDFFGCDSHFSVAYLYDELKAGYSDRLKTKPNLSKNIDRIWNNFCNYMNSDSGNTEARLAYFGELFYKPKETGDAKSDYKTHLSNNQKEEWELKSDKEVYNIFAILCDLRHFCTHGESITPSGKPFPYNLEKNLFPEAKQVLNSLFEEKAESLGAEAFGKTAGKTDVSILLKVFEKEQASQKEQQALLKEYYDFKVQKTYKNMGFSIKKLREAIMEIPDAAKFKDDLYSSLRHKLYGLFDFILVKHFLDTSDSENLQNNDIFRQLRACRCEEEKDQVYRSIAVKVWEKVKKKELNMFKQVVVIPSLSKDELKQMEMTKNTELLSSIETISTQASLFSEMIFMMTYLLDGKEINLLCTSLIEKFENIASFNEVLKSPQIGYETKYTEGYAFFKNADKTAKELRQVNNMARMTKPLGGVNTKCVMYNEAAKILGAKPMSKAELESVFNLDNHDYTYSPSGKKIPNKNFRNFIINNVITSRRFLYLIRYGNPEKIRKIAINPSIISFVLKQIPDEQIKRYYPPCIGKRTDDVTLMRDELGKMLQSVNFEQFSRVNNKQNAKQNPNGEKARLQACVRLYLTVPYLFIKNMVNINARYVLAFHCLERDHALCFNSRKLNDDSYNEMANKFQMVRKAKKEQYEKEYKCKKQETGTAHTKKIEKLNQQIAYIDKDIKNMHSYTCRNYRNLVAHLNVVSKLQNYVSELPNDYQITSYFSFYHYCMQLGLMEKVSSKNIPLVESLKNEANDAQSYSAKKTLEYFDLIEKNRTYCKDFLKALNAPFSYNLPRFKNLSIEALFDKNIVYEQADLKKE

SEQ ID NO: 209 - DNA, 36 bp, Artificial Sequence
  DR
gaactacacccctctgttcttgtaggggtctaacac

SEQ ID NO: 210 - protein, 998 aa, Artificial Sequence
  250twins_35838_GL0110300
MGNKQRVSAQKRRENAKLCNQQKARQAESQRDKIKNMNVEKMKNINTNDIKHTKTTAKKLGLKSTIIADKKIILTSFINEQSSKTANIEKVAGFKGDTIDTISYTPRMFRSEINPGEIVISKGDDLSEFANPANFPIGRDYVKIRSALEKQYFGKEFPEDNLHVQIAYNVADIKKILSVYINNIIYMFYNLARSEEYDIFYNSQSENSGRDCDVIGSLYYQASYRNQDANRFEKDGKKKAIDSLLDDTRAYYTYFDGLFSVPKREDDGKIKESEKEKAKDQNFDVLRLLSVGRQLTFHSDKSNNEAYLFDLSKLTRAAQDENRRQDIQSLLNILNSTCRSNLEGVNGDFVKHAKNNLYVLNQLYPSLKANDLIGEYYNFIVKKENRNIGIRLITVRELIIEHNYTNLKDSKYDTYRNKIYTVLNFILFREIQENSIAIKNFREKLRSTEKAEQPALYQAFANKIYPMVQAKFAKAIDLFEEQYKTKFKSEFKGGISIENMQQQNILLQTENIDYFSKYVLFLTKFLDGKEINELLCALINKFDNIADLLDISKQIGTPVVFCADYESLNDAAKIAENIRLIKNIAHLRPAIQEAQSSKDNADAAGTPATLLIDAYNMLNTDIQLVYGEAAYEELRKDLFERKNGTKYNKKGKKVDVYDHKFRNFLINNVIKSKWFFYIAKYVKPADCAKMMSNKKMIEFALRDLPETQIKRYYYTITGNEALGDAESLKGVIIEQLHAFSIKNTLLSIKNMGEGEYKIQQIGSSKEKLKAIVNLYLTVAYLLTKSLVKVNIRFSIAFGCLERDLVLQKKSEKKFDAIINEILLEDDKIRKECDKERAQAKTLPRELAQERFAQIKRRESGCYFKSYHVYDYLSKNSNEFKQNHIDFAVTSYRNNVEHLNVVHCMTKYFSEVKDVKSYYGVYCYIMQRMLCDELIIKNQDKPDVRQTFEEYNRLLKDHGTYSKNLMWLLNFPFAYNLARYKNLSNEDLFNAKNNDQKSK

SEQ ID NO: 211 - DNA, 36 bp, Artificial Sequence
  DR
gtacaatagcccgttgaaatagatgggttctaagac

SEQ ID NO: 212 - protein, 1020 aa, Artificial Sequence
  250twins_36050_GL0158985
MKKKHQSAAEKRQVKKLKNQEKAQKYASEPSPLQSDTAGVECSQKKTVVSHIASSKTLAKAMGLKSTLVMGDKLVITSFAASKAVGGAGYKSANIEKITDLQGRVIEEHERMFSADVGEKNIELSKNDCHTNVNNPVVTNIGKDYIGLKSRLEQEFFGKTFENDNLHVQLAYNILDIKKILGTYVNNIIYIFYNLNRAGTGRDERMYDDLIGTLYAYKPMEAQQTYLLKGDKDMRRFEEVKQLLQNTSAYYVYYGTLFEKVKAKSKKEQRAKEAEIDACTAHNYDVLRLLSLMRQLCMHSVAGTAFKLAESALFNIEDVLSADLKEILDEAFSGAVNKLNDGFVQHSGNNLYVLQQLYPNETIERIAEKYYRLTVRKEDLNMGVNIKKLRELIVGQYFPEVLDKEYDLSKNGDSVVTYRSKIYTVMNYILLYYLEDHDSSRESMVEALRQNREGDEGKEEIYRQFAKKVWNGVSGLFGVCLNLFKTEKRNKFRSKVALPDVSGAAYMLSSENIDYFVKMLFFVCKFLDGKEINELLCALINKFDNIADILDAAAQCGSSVWFVDSYRFFERSRRISAQIRIVKNIASKDFKKSKKDSDESYPEQLYLDALALLGDVISKYKQNRDGSVVIDDQGNAVLTEQYKRFRYEFFEEIKRDESGGIKYKKSGKPEYNHQRRNFILNNVLKSKWFFYVVKYNRPSSCRELMKNKEILRFVLRDIPDSQVRRYFKAVQGEEAYASAEAMRTRLVDALSQFSVTACLDEVGGMTDKEFASQRAVDSKEKLRAIIRLYLTVAYLITKSMVKVNTRFSIAFSVLERDYYLLIDGKKKSSDYTGEDMLALTRKFVGEDAGLYREWKEKNAEAKDKYFDKAERKKVLRQNDKMIRKMHFTPHSLNYVQKNLESVQSNGLAAVIKEYRNAVAHLNIINRLDEYIGSARADSYYSLYCYCLQMYLSKNFSVGYLINVQKQLEEHHTYMKDLMWLLNIPFAYNLARYKNLSNEKLFYDEEAAAEKADKAENERGE

SEQ ID NO: 213 - DNA, 36 bp, Artificial Sequence
  DR
gtacaatagccctgcagtaaggcagggttctaagac

SEQ ID NO: 214 - protein, 903 aa, Artificial Sequence
  31009_GL0034153
MGSRGVIIMTEKRKSRAKALGVKSAFLKDDDVIMTSFGRGNDAVVEKIIKNNEVQNINIDKPVYDVVGVEKETGIINVVGTKRGINTINKKKQYANTQVSQKRMGMDLIQRKDKLEKVFFNENFNDNIHIQLIYNILDIEKILSVYVNNIVYALGNLERDNSDDEKDLIGYASTLNSYEDFINKNLVKQNENIDKFIENGNRLGYFGNVFYKNKNELKDKKDIFDMLCLLGSLRQFCFHFKGAKFEGVEQISNSWLYNLSQLHNEFKSTLDSFYNEKIEDINGNFIEKNKVNIQILCNDLKLDKNKLVQDYYNFLISKNHKNMGFSIKKIREYILDIDYASYIKEQGYDSVRSKLFTLIDFIIYDLYVNKEKDRIDDIVSKLRGAIYDYKKDDIYKAEADWVWKKLNRQIKALTKLLSNRRIFSQDNDITNWNGVEFEKIGEQKLEDNADYFCKLMYFVTLFLDGKEINDLLTTLINKFDNIRSFIEVMEEMSLKCEFMEEYKFFNESKDICLRLKEIHSFARMKRPLDNKNVEKEMYKDAISILMKDSSIENSNIDVIFNTYIYQKDNKNAKKDFRNFIIKNVIKSNRFIYLIKYSNPTNVRKFASNTNVIKFVLGTLPDKQLERYYKSCGLSDGIGKTEWVRELSEIITGIDYSDFLNVKQRAKSKEEKEDKAKKQAIVTLYLTILYILTKNLVNVNSRYVIAVHCIERDSELYKTELYEKLKPEQPEKLYKIKPDKPLQPAQYFLFTKYLLQNDFFGEYTSKKNQYIQKNMKIYSKINKNFNVFVRYRNNIAHLNSIKNATKYVNDIGTFTSYFQLYHYIMQCDLKDWVKKEVEEKKISDKYYNYLEKYYKNNNIYLKDFVKAINVPFAYNYSRFKNLSIDKLFDKNDPRKKKWIVIFNF

SEQ ID NO: 215 - DNA, 36 bp, Artificial Sequence
  DR
gaactacacccttgttaaataacatgggtctaaaac

SEQ ID NO: 216 - protein, 951 aa, Artificial Sequence
  530373_GL0023589
MKTEMKNGEVKTSAKKENCSIAKANGLKSTFKLAENTYYMTSFGKNNTADPEKNIVRMNVENIRNTFSATPISERIVDITGETKKTAQVVLPACSDNQLHAKDTIEQMYFGKTYTDNIHIQIAYNIMDMKKIFGVYSNNIIYSINNLLEEREGSDFLGVFYTENSYQAMNFADAIIKSKLLTKNSKYLNLDMNNVWFNKEVSELSSFRKYVYSRSYANKTSTAKKICICLQEDFHFFDYATVKKAADQFTLLKRIQRSNYFFDMLCDSAGNYQCKNAQILLSILGNLRQESFHENRSTSAWMFNLEKVLTPERKKLLTALIDSRTNHINNHFIENSNKNLNAIFRLFPEKSQADLIVEYYDFSVRKAYKNLGFSVKLLREMLLKTQQELSPLNDKAYDSIRSKLYTMFDFVLYKLYVDNEEQIDQFVRKLRASTSNVEKEALYQQESERTWNEIRGQIIDNVIPFIDSIQKQENEDKLTKRIDQSIIDKAVPHFVNSRDLSYFAKVVYVVASFLDSKEINMFFDALINELENIASFNDVLEQLDMPLDYQEKYRFFERSREEAAGLRFIKSIAKMNKTRVAVKNDTKTVKLKQYCDAGAVLGEINAEKIKAAFGLGDKFNTEEARVDHTFRNFIINNVINSNRFNYVMRFMNPKSARRIMQCESLVAFSLKDIPDTQIERYCKSVNIPFDSANPNYAHMKEQLTYKLLQVQFCNFSKVSNSSHQAVEKERLKALVGLYLSVLYRIVKSIVRINTSYTIAFAAYERDCVILNRKMGKNLYGLKTDPMGITNDFMHMPTVAPSNPHNDFINETKLSKRVCALVNKNRTLCTNRTYQVYRNIIMHLNAVSAFPQYLEGLKVVHSYFDLYHYTVMMLLHRQNEKEKKRNEKEKKQNEKENNMILSTAALEKYDMVRKYQSANKDFIYAINSPLAYNAARYINLSCRTKFEEGFGK

SEQ ID NO: 217 - DNA, 36 bp, Artificial Sequence
  DR
acttaaatccccctgtaaatgcgggggttctaaaac

SEQ ID NO: 218 - protein, 928 aa, Artificial Sequence
  BMZ-11B_GL0037771
MSKDKKTKAKRMGVKALLAHGEDKLTMTTFGKGNRSKIEFTEGYHGRALETPKHFGKRGFEVRKIDENVDLYGDLEEGKTIEALLINPSEKVGEDYLKLKGTLEKRFFGREFPHDNIRIQLIYNILDIYKILGMNVADILYALGNMQDTELDIDMFGQSLNNPEKAKDVVQRMKPYMGFFGGIFRTQKKEDRKKDSNLSEEEKEEKKKKQEELLQKDLQHNMDVARCISALRHATAHNKPATAHDKQDEYPWFKSSDIYETKIFKAGMWSVIEADYKKKIQDVNKQFFSKNKVNLAILFDLLDVRDVKQKKRISDEFYRFTIRKDGKNLGMNLVKIREIIIDRYASGLRDKKHDPHRQKINVIADFLIFRALSQNQGIIDKTVSSLRLTKDEEEKDHVYQNAAELVWGMVSNCLTPYFNDPKNKYILKYKDAKTPGDFEDWITSKISEDDGEPFVKVLSFLCNFLEGKEINELLTAYIHKFECIQDFLNVISSLGENVQFQPRFALFNNASFAQNVAVQLRILASIGKMKPDLTEAKRPLYKAAIRMLCPPEKWEKYTSDEWLEKNMLLNSEDRKNDKKKKQVNPFRNFIAGNVIESRRFMYLVRYSKPKAVRAIMQNRSIVNYVLHRLPSEQIKTYSRVFPEDFSDTEAEIDFLVNKLSEFSFETFISNQQTILNNSKRGFSPNRRETAEEIERLKAITGLYLSVAYIAIKNIVKANARYYIAFAVFERDKELVKAKDARIQTTIPNTKFTNYFCLTQYYLDRDEEKKFPGDPRDKEAFFEHLRKTKRHFSKQWREWLNEKIADAKSSQATGLLLREARNDVEHLNVLRAIPDYIQDFRHGEKGETAMNSYFELYHYLMQRLMLKNTELDLSHWSGWIMRSGRPDRDLIQIAFVSLAYNLPRYRNLTKEHHFDDTVLQKIREKESLD

SEQ ID NO: 219 - DNA, 36 bp, Artificial Sequence
  DR
ggtcaacagtgtggggaattacccgcactctacaac

SEQ ID NO: 220 - protein, 940 aa, Artificial Sequence
  BMZ-11B_GL0037915
MAEHSKKTAAKRVGIKSVIAHDGGKLAVTTFGKKSAAKLAYRDGDQTPFDEEKKSELGGFNVTGVDENTVDAERGIPGEGLIEASVANPVNDLIDESRKEYGQDYLMLKDQLEKVFFGQTFPGDNLRIQIIYNILDMQKAFGLYVNDVLYAVNNLQNTGRLLTDDDWTSDVIGLALGKGRGKEIIESMSDALGFFGSAFKPIPKKPGDKTSGKYAGGKLKERDAAIAEDVAVLRVLCGLRQISAHFRSEKKGESLWASDLGVEKYFKNEMSVVDANYKARAKKIDANFMATSRANLVLLFRILNAKTKEEKEKIAVDYYKFAIRKEGKNLGVNLKKAREILLDKHYPDAKNKQFDSYRGKLYTITDFIIYRMAAEDGAFLEESVQKLRSTPSEEEKEKVYDVLAETIWNATKDDVKKVFDIRQQDIKNAAAQSLDDVNLDSVTVEKEKEFPVVKLLAFLCNFLDGKEINELLSTFVNRLENVQALIDLAKNLGETVNFSKNYAVFNDCGSGAAGRIAERLRLLASIGKMDAGLDSLKPLFIRFAIQILGGARISDEDVDAYIKENILVRKDDPEKKRSNTFRNFITNNVIKSRRFVYLVRYTKADAVRAVMKNGKIVRYVLARIPETQVDSYYKSVVDSSDAGNGKPIKEKIKALAEKLGEFSFDLIAENRDGIIDNAKLDEEKKNVEIERLKAVTGLYLTVAFIAIKNLVKANARYYIAYSAFERDSELLKEKLGEEEFYKLCIEFKNKKGETGYNNAFALLKYYIDRDEDIWRKEEATHRGRDENGKLDYDPDPRRKHYPKRRWLNILKDNLAEMERIDPTGMLAAQMRNDAMHLNAMFKIAKFVGDFRKGSSHEMRSYFELFHFLEQKTLLDSKEDFVQGMRESYGDRIRVEPCVDLIKYLYITLGYSLPRYKTMTVSGLFDPDSEDAKERAKGKRA

SEQ ID NO: 221 - DNA, 36 bp, Artificial Sequence; identical to SEQ ID NO: 219
  DR

SEQ ID NO: 222 - protein, 923 aa, Artificial Sequence
  BMZ-11B_GL0069617
MPHNKKSTIKRIGVKSAFSHGNSRLTITQFGRGNTADIAVETDSRGRSLSLPHRVEKSFTVNKIDDEIDVQRSSLLGTLLNPAENDPVDYLGLKSTLEKEFFGQEFPNDSIRIQIIHNILDIQKILGIYINDVLYSIANLQNVETVEDCLGQSLSKGQDEKLKKILNSITPYLGFLGAGFKQSERPKHQKNSRPDPRQKIEDPNWAYNKSALRILSTLRNKLAHFEDSSILFCDNLKGQFLGSNGNWITIETHYDEMITRINESFFNNSRMNLKILYLVLNAATLEDKKKITEEYYRFSILKEGKNLGVNMRKLREMMVDMFYSEIKDKQYDSYRQKIYTILDFLLFREIKDSEELETMVADLRESESDEKKEELYHDYAELFWDGVKDLIVPFFAAFDGDFTVFTTEKVPADTSKEPFLSSANTEPLVKLLAFLCNFWDGKEVNEVLSAYIHKFESIQAFIDVLESKELNEKVVFSAKKGRNFSAFNEHGFAGRVADQLRVLASIGKMKPDLEGAKRALFRDAVETLGIVENSNWLNEDGTISNDWLETYVLPGDKVTEEEKRAIKPFRNFIANNVIESRRFMYLARYAKPKSVRELMKHEEIIRYVLTRLPEKQIDTYFSNISEGDESEISRKIDTLTKALTGFSFNSLFINRDKIVENTKLDTSNKNVKIERLKALTGLYLTVAFVAVKNLVKANARYFIAFSAFERDYGFMKSHDPDVAQSCLAYEEIMDGKSKTKYNEIYALTEYYLKKEEENDYHPEPGQPFDKEACRKHLDSIRRHFTKKWRDIFRKEIDEAVKIHFTGYLGVWARNQSAHLNVLTQALPQFIGQFARNSKTGKTARMTSYFQLYHYLLQRLLCEDLNFDVPEEWKNKIQETGLPCNDLIHICFVPLGYNLPRYKNLTIECLFDEDSVSAKEGKKA

SEQ ID NO: 223 - DNA, 36 bp, Artificial Sequence
  DR
atacagcagccctacagattcgtagggttctgtgac

SEQ ID NO: 224 - protein, 993 aa, Artificial Sequence
  DLF014_GL0011914
MAKKKNAKQRREEEKNRLKAKIEKFKIKYAEQETVDKITEEIAQSDKIMRTESILVQHTKKSLAKASGVKSVFIKDDEVIMTSFGRGNDAVVEKIIKDNNVDEKNTKPAYEIVDIEKNGDLIKVQSRRCKNIESANTELPPEKIGMDLIRCKDKLEEIYFGRTFNDNIHIQLIYNILDIEKILSVYINNAVYALGNLERKENDKEKDLVGYLSARAGYNKVINKAINDEKIKDRIEDLKEFIENGNRLGYFGDIFFKKEEVSKNGKKPKKVEVLKSEKEIFDILALLGSLRQFCFHYDEAVFENEDGVIDKEYNDNSWLYNLEKLEPEFKDTLDYFYNRKINDINKGFIKTNQINLHIICDELGLNWDKEQVVGDYYDFLIAKKYKNIGFSIKKIREHMFDIYEAFDIKDKRFDSVRSIMYKIIDFVIYYSFIHYKQDEVDEIVNYLRSTLSEEQKKEKYIKLAGNIWAEYKTQFNKLKDILLANIKEFSDAKEDDVYYEEFKNFKFNEVGKEKLGENAEYFCKLMYLLTLFLDGKEINDLLTTLINKFDNIRSFVELMKEENIECIFDKKFAFFDESKNVCSTLREINSFARMQKPLNNVSVKREMYKDAIKILLKDTRAEEQNIDRILNEYIPSKEDKGIKKDFRNFIIKNIIKSNRFMYLVKYSNPTDVRNLASNRNVVKFVLNAIPDTQIDRYYKSCIQHYSNEVDKETQIQELTDIITGIDYLDFLDVRQSYRNEDKSKKQAVVTLYLTILYILTKNLVNVNSRYVIALHCLERDSKLYGYTKLSKKNNKKLEKIKPPKYHELTKYFIDNRYFDRKKKNKKYGEYTSKKISTYIETNMKNFIGCEQFRTPERYRDTQIDMFVKYRNSIAHLNAVRKASKYINDIRGFDTYFELYHYIMQRDLKDILEKIAEGAAKETEEGQKQDELLKTYFDNLDKYGTYVKDFVKALNIPFAYNYPRYKNLSIDELFDKNNTRKTIKIQDKKLEERT

SEQ ID NO: 225 - DNA, 36 bp, Artificial Sequence
  DR
gaactactacctcacagatttgtggggttcagaaac

SEQ ID NO: 226 - protein, 924 aa, Artificial Sequence
  EYZ-362B_GL0088915
MKKKLNIREQREAKKAAAKQIYAAKASAAQKKADETVVAAQPAGDTANSKPIKSRNKAAGLKSTFVVGDSLYMTSFGKGNLSVPEYRVDTGDAYRVDPISEHSELHVLGADDLAVSFSGTRRMKDVSELKADNPLHSGKNNLVPKNGTDILGLKGILEQRYYGRNFDDNVHIQIIYNILDIEKNLAIYVTNVVAALDHMCDETLDTEHEDFIGYMNTMNSFDVFMHPSQSSRADIYKKINDSRRRFENLLRTKRLGYFGFAYNPKDRNQKKRLYYLMSMIGQLRQFAFHKDSPFNRVWLYQLDEKLSKEHKDTLNYFFDQRYDEIHENFNKTNKVNLELLAEAFPSEDYATLANQYYDFTVFKAHKNLGFSIKKLREKLIENALRDEKIDSFRSKLYRLIDFCLFRIYLKDPDRAEKNVRFLRSCINEQEKEQFYTQEANALKSENPGLVNDFCMQLKDRYSSGSNSTENAEKKEDFPVFPHCHDKQKVSNVSLFAKLMYAFCLFLDGKEINELLSALLNKFDTIACMTKCTKDLGIYAPFSKDFNFFEDSEQRAEEMNLVKSIARMTKPDIQAKEQLFRDALDILGVEVGVSEEALQKEIHQYFQKGAKHDFRNFIINNVINSTRFIYVIKFCNPKTAGQIIRNENILRFVLQRMPQEQIERYYHACTKNPSLCTHDEKIQCLSNIIMEVRYKKFCNVAQKSRDTTKQMEKERFKAIIRLYLTAIYLVVKNLVNVNARYVLAFHCLERDADLFGLQIKQTLPDRKKKSDYLKLAVDQCGDNPENKPKGYLARNKRLCQCVREDIDNAKHLNGDITDYRNCVAHLNVVRNCDQYLENIDTVHSYFSLYQYLVQHYLLKRFEKDKYRCKDDLAIHYYSQVKQYRSYVKDLVKALNAPFGYNIPRFKNLTVEQLFDRNADPETITA

SEQ ID NO: 227 - DNA, 36 bp, Artificial Sequence
  DR1
gaactatagtagtgtgaatttacactactctaaaac

SEQ ID NO: 228 - DNA, 36 bp, Artificial Sequence; identical to SEQ ID NO: 130
  DR2

SEQ ID NO: 229 - protein, 1054 aa, Artificial Sequence
  Ga0099364_10024192
MSQSTKTKAKRMGVKSVLAHGKDEKGHIKLAITAFGKGNKAELAIQTDEKGSNLAKTYKERNITANKIVSEGIQTSGTIAGEGHATFLNNPAEHVGTDYLKLKETLEMEFFGKSFPGDSVRIQIIHQILDIQKLLGIYITDIIYCINNLRDETHLDHESDIVGLSMSNTNVNLALNQMRPYFGFFGEAFRPVGDDKVKEITLSDEVRKNIEKIIALEEQKRNPSTPRFKQENINLEIENAMGKFKSKDAFETAKKKYNRIVADETNAKTLRILGAMRQITAHFKDQATLFMSDVELPKILKKEFSKADWQTVEDYYAKLVDRINEGFCKNAATNVHFLTELLPEESKKQLTEDYFRFAILKEGKNLGVNMKRLREVMFALFVPELTAPETKKRYDSYRAKIYGLTDFLLFKHIHNTKQLEEWVAVLRETSNEDAKENLYDEFARTAWNTVGDSAKQLIENMQSYFTKKEKEITKTAQPVLSTSSIAHTSKKITQFSSFAKLLAFLCNFWEGKEINELLSAYIHKFENIQEFINLLEKLEGKKPQFTENYALFNEAAGQRAGEIAQNLRILASIGKMKPDLGDAKRQLYKAAIEMLGIDTEEYISDEWLEPNMLLAQPPKEPKKDNEKYRKEPHKYSYEKDMETYRKKLREYEETWRSLIDYEYLMPETNPFRNFVAKQVIESRRFMYLVRYTKPKTVRALMSNRAIVHYVLSRIADIQDHHMTESQIDRYYQNLPQYNEQQHKNVSLETKIDALADYLCKYTFEKNVLKQKNGIVLNTKSATKNVEIEHLKALTGLYLTVAYIAVKNLVKANARYYIAFSIFERDYALFEKKLGKDTLEKYVKPFKYIDKGEEKEGKNNFFALTEYLLDKDNSLRYQWNNDLSDEENKQALRKHLDKKEIRSQRHFSQYWLDIFARQIENAKKTSESGYLLTAARNCALHLNVLTALPEFVGEFRKTGDKMTSYFELYHFLLQKLMLAEAGLNLDEYRERIDTYQTACKDLINITYVSLGYNLPRYKNLTCEPLFDEESATGKERQTRLDEKSKEKKQRKGGQK

SEQ ID NO: 230 - DNA, 36 bp, Artificial Sequence
  DR
gtgcagtagccttacagattcgtagggttctgagac

SEQ ID NO: 231 - protein, 971 aa, Artificial Sequence
  Ga0187910_10006931
MIEKKKSYAKGMGLKSTLVSDSKVYMTSFGNGNDARLEKVVENNAISCLVDKKEAFVAEITDKNAGYKIINKKFGHPKGYDVVANNPLYTGPVQQDMLGLKETLEKRYFGSSVSGNDNICIQVIHNILDIEKILAEYITNAAYAVNNIAGLDKDIIGFGKFSTVYTFDEFAEPDRHKERFIKDGKLDTKLINQLKNQYDEFDAFLDDTRFGYFGKAFFCKEGDKYLNKQDNERYHILALLSGLRNWVVHNNEVESKIDRKWLYNLDKNLDKEYITTLDYMYSDIADELTKSFSKNSAANVNYIAEILNIDSKTFAEQYFRFSIMKEQKNLGFTLTKLRECMLDREELSDIRDNHKVFDSIRSKLYTMMDFVIYRYYIEEAKKIENENKTLSDDKKKLSEKDIFIISLRGSFSEEQKDKLYSDEAERLWAKLGKLMLEIKKFRGQMTRDYKKSDTPTLNRILPESEDVSTFSKLMYALTMFLDGKEINELLTTLINKFDNIQSMLKIMPLIGVNAKFSSDYAFFNNSEKIADELKLIKSFARMGEPVANAKRDMMIDAIKILGTDLDDNEIKKLADSFFKDSNGKLLHKGKHGMRNFIINNVVNNKRFHYIIRYGDPAHLHEIAKNEVVVRFVLGRIADIQKKQGKGGKNQIDRYYEICIGNGYGKSVSEKIDALTKVIINMNYDQFEAKRKVIENTGRDNAEREKYKKIISLYLTVIYQILKNLVNVNSRYVIGFHCVERDAQLYKEKGYDINTNNLESKGFTSVTKLCVGIADDDPVKYKNVEIELKERALASFDALEKENPELYEKYNMYSEKQKEAELEKQINREKAKTALNAHLRNTKWNVIIRENIRNTEKDACKQFRNKADHLEVARYAYKYINDISEVNSYFQLYHYIMQRIIIDSSGNNANGMIKKYYESVISDKKYNDRLLKLLCVPFGYCIPRFKNLSIEALFDKNEAAKYDKIKKKVAVR

SEQ ID NO: 232 - DNA, 36 bp, Artificial Sequence
  DR
catgtaaacccctaacaaatggtaggggtttgaaac

SEQ ID NO: 233 - protein, 1105 aa, Artificial Sequence
  Ga0187910_10015336
MENVKNPKEIVKGAKVRFEIYENPKPKKQNQRFSAINVEVITDETHKEAKIQKNEFKTFDQFTKELQETQKVNGETKKEHITKNKHTNVKAAGVKSVFAVDDGNVLITSFGRGNAADIETLKSDDDKTINLTETENQKKYVVTNKRSNVKGLADNPTKVESIIPGETQIGFKSILEKHFFGRTFNDNIHIQIIHNILDIKKILAVHTNNIVYALDNIHERGRENSAEKPIDMIGAGGISTSKEYEQYCSEKSDYEDNFLKQLINNERIAYFGNAFFKDEGNKKVMRTEKEIYYILGMLNEVRNVSTHFTEEDNRDWAKANLYNLSNRLKVGSKEVLNQLYKEKIDKIDANGFVNKGCKRDFSILFKSLNLTTDKDKGELVVGFYDFSIRKNYKNIGFSIKTLREYMLKISNSTLCADTISNNAIRPKAYKLYDFIIWHYYMNKPDKINDFVEKLRTQNKNDEKIKLYYDEAVCLLSELGREIHTMTSCVHNIENTSYEITDKKQKEYYKMQINSLNSADKVSDFSKVIYLVTLFLDGKEINDLLTTLINKFDNIASLLSVLEKQSGKKVEFVENYSFFNSSNLLKEKTLNKSENYTCKIVEELREINSFARMTGDCKIRKSAFEDASQLLGYHDKTVNNLFEVLRLKELESKDWKKRTDDEQQEYDRLLNKHHYFKSGKKLPDTGLRNFIINNVIESRRFNYIVRYADPKKIRKCTENNELLKFAFKDVPDSQVDRYYNICVTNKITNATREEKIERLVDIIKSMNLSKVATVKQRDKQDNVEKQKQLAIMSLYLNILYQIAKNLVYVNSRYVMAFHSLERDSQMLFDAYYDVKRGYCDLSTVLLFGVDDLQNRNRGSYKYLRDNRRSNKDVIETFGDFKGKVSKVVEKKNQGLTNEIYDSLCNVAGTTKTEVQNEIKSILKSNGLDESASSYLSHKLVNKVHSYKYLKQNLDCADNTMINQFRNNVAHLNTIRNMDGIENVTGITSYFQIYHYLMQKALYKEFKKCRENAVRKWIPYITENAEPKYVYWNKKEQQEVEVSFNPKIFGYMENIKNHSNTYCKDFVKALCAPFAYNLPRFKNLSIEELFDMHELSEEPKESMKLTD

SEQ ID NO: 234 - DNA, 36 bp, Artificial Sequence
  DR
gaacgacgtcactacacaccgagaggtgtctaaaac

SEQ ID NO: 235 - protein, 927 aa, Artificial Sequence
  Ga0187910_10040531
MAKKKKAKQRREEQEAARMNKIQSAVKAKAETAPAVSSAFVEKRKDKQSKKTFAKASGLKSTLAVDNSAVMTVFGRGNEAKLDHRINADLQSESLHPQAALKNVHAPNKQKIHFIGRMQDMNLTADHPLHSHDGERAVGADLLCAKDKLEQLYFGRTFNDNIHIQLIYQILDIQKILALHANNIIFALDNLLHKKNDELSDDFVGMGRMRATIGYDAFRNSTNQKVQETYREFQEFVRRKELLYFGSAFYNGDTRRDEKVIYHILSLAASVRQFCFHNDYTSDDGKGFIKADWMYRLEEALPAEYKDTLDALYLEGVEGLDQSFLKNNTVNIQILCSIFNHDDPNKIAEEYYGFLMTKEYKNMGFSIKKLRECMLELPELSGYKEDQYNSVRSKLYKLFDFIIAHYFRKHPEKGEEMVDCLRLCMTEDEKDSHYEGTAKKLVRELAYDMQEAAEQANGSNITQMQKNEQQGKTKGMFAIRDEIRVSRKPVSYFSKVIYVMTLLLDGKEINDLLTTLINKFENIVSFEDVLRQLNVDCTFKPEFAFFGYDRCRNISGELRLINSFARMQKPSAKAKHVMYRDALRILGLDNGMSEEALDQEVRRILQIGADGKPIKNANKGFRNFIASNVIESSRFRYLVRYNNPHKTRMIAQNEAIVRFVLSEIPDEQIRRYYDVCRDPKLPRSSSREAQVDILTGIITDVNYRIFEDVPQSKKINKDRPDANDRMTLKKQRYQAIVSLYLTVMYLVTKNLVYVNSRYVMAFHALERDAYLYGITNIKGDYRKLTDNLLADENYKKFGHFKNKKWRGIAEQNLRNSDVPVIKSFRNMAAHISVIRNIDLYIGDIQKVDSYFALYHFLMQKLIQRVVPENTKGLSDQTKKYYDALEQYNTYCKDFVKAYCTPFAYVTPRYKNLTIDGLFDRNRPGEDK

SEQ ID NO: 236 - DNA, 36 bp, Artificial Sequence
  DR
caactactaccctgccaaatggcagggttcagaaac

SEQ ID NO: 237 - protein, 900 aa, Artificial Sequence
  Ga0187911_10069260
MSTKKRFRYSVAAKAAGLKSSLAVDTDRTVMTSFGHGNAAILEKEIVDGEISVLNIENPAFDAVINDKKYALTGHHAGVHALVDQPQNRSDAVHIRGALEKKYFGDTFADNIHVQIAYNILDITKILTVYANNVVYALNNLVHADDDTQADELDSLGNFSAGTSYAKSKSKSKSKQQDFVELFIKKKEIHGYFGDTFAFLDKRIADADKEKQVYAMLACLGSLRQACSHYRIRYSVNGKNVDADADTWLFSSAQLDQTDPLFSEMLNRIYSHKIKTVNQNFFENNRKANFPILKKMYPETTLKVLMNEYYDFSIRKGYKNFGFSIKSLREALLSPQYESLIGVQIKDNKEYDTVRSKLYQLFDFALTRYFNQHPDMVDAFVVELRSLAKDEDAKNAVYEKYAKAVWNDVKQPIAVMLSYMNGSAIKNIKAFELKPDQKELNGIMNSNALDVPHFCKLVYFLTRFLDGKEINDLLTTLVNKFDNIHSFNQVLTALGLSASYEADYKIFEDSGRVVEYLREINSFARMTVDMEKIKRSAYKKALLILGSSKYSDEDLDARVDEMLGVDYNQNGEKIKVRVDTGFRNFIANNVVESSRFHYLIRYCHPRKIRNLAGNAALIEYQLRRLPELQILRYYEACTEPIKRTARTMDEKIGTLIDLIVKMDFSQFEDVQQNDRVRVFSDAEKKEKIRKMREKQRYQSIISLYLTMLYLIVKNLVNINARYVMAFQAWERDNYLLLQLSGKEAEAEYLNLTRHFIEPLDGAKPYLKKRPVEYLKKDMAMVGNSSIRHFRNATVHLNVIMEAHRYTKDIKYIGSYYALYHYILQRHLLDKIEEDSYAEKTVSEKLWESQISQYGTYSKDFVKALCCPFGYNLPRFKNLSIEQLFDRNESKEITDATAPRQ

SEQ ID NO: 238 - DNA, 36 bp, Artificial Sequence
  DR
gaactacagccctgtgaaataacggggttctaaaac

SEQ ID NO: 239 - protein, 991 aa, Artificial Sequence
  MH0288_GL0082219
MKKMTAKERREQEKQKRAEVIRGKQEANRKKAQAAATQDATAPVHHKNAKSLAKAAGLKSTFTLPTGELLMTSFGRGSEALIQKRIMKDVISDVQEGDPAFSVIPMPKQFEIQGRAIDVQKEGSSVPEVLTDDPRASQKPAGADLIGAKPALEKRYFGKTFTDNIHIQLIYRILDIKKVLAIHANNIVYTLDNLSRREGTEGTDFIGIGGLTLKNSYAAYCEPRTFFDEGKEKNIIENIEKSHGEFLEYMKNPRLAYYGEAFYRRLSNNERSKLGMERYERMSDAQRDAFDRKYPIDFCDGELHFREIEKLAPEYVRKSEKEIYYILAMLSELRQCVFHDSAASRSWLYNLEKVLPAEAMQVLDGVYSQKVAALNNFSKTSSKSNFRLLFNALHADTDAQKKQIAEDFYKFSVRKTYKNIGFSIKLLRESMLDTFAPEYKEKSYDSVRGKLYQLVDFLIWNIYDKNEKMADALVAQLRAEVKRDRDEKSPVYDREAARLWTMIREAVAQTAKTLRAVTLSNNTPGSIKIKELALSKYDRDLVENAIDSAVDERGRRLKITDEASYFSKLIYLLTLFLDGKEINDLITTLVNSFDEIDSFCCVLQKAKLDRGFTEGYRFFAHSAEISQELRAINSFARMTTETVQGKPCMFEDAADLLGMDTDLEEVREALEAFYNKEKMSLKWTKDGQEADTGFRNFIISNVLKSSRFRYVVRYGNPKKLREVMQNEAVVKFVLNDLPEEQINRYSENILGLDAAAKEKKVSELARFLRALSLEDFRDVEQSANAARNARKARYQGAMSLYLNVIYQIIKNMVYINSRYTLAFAKYEHDASLLLDNWVYDPYKTVFSDLTEDSLQKGKLNRRAAKYLQTNLEHSDNTLIRQYRNSVAHLNAVRNMNLYIGDLREITSYFGIYHYIMQRDLITRCQKVKMKNPVVVGYFDKVRTYRTCCKDLVKALNITFGYNLPRYKNLSIEGLFDKNRPGDKKESALIAE

SEQ ID NO: 240 - DNA, 36 bp, Artificial Sequence; identical to SEQ ID NO: 203
  DR

SEQ ID NO: 241 - protein, 925 aa, Artificial Sequence
  O2.UC29-0_GL0096317
MERQKRRKKSCAKMAGVKSTFVIDSDLLMTSFGERDKAVREKYIAQGNVKSLRKQEQAFDAQYGKEKIFVTNADNKLHVAINNPLCGNKKQSPEAQEYSRRVLEHKKAINQKYETIVFGKPSNDNIHIQVVSKIMDIEKTFSFVMGNIVYAINNLDPEQNIDNPIDYMSNKARTDENLKRVLRRCMYLFDLGFEYAEPSPYKKSEQQIEQEREEREKENLETLKKALDVISVMRTDSFHGYDMCNSTSAIVKFPSKKFNLDQKGKNLIYRNAFKYKTDTIKKQYAQNSKVNINFLSYVLYGNGCTEEQKKELSREYFNFAILKQYKNLGFSITSLREQLLSLYDIDFECKRNLRSRANSFCDYVLYYRYAVQFPERIVDLVDKLRCSANEKEKTNVYIEEANRIKEDLRIAFNRINNFDAKSIKLYSTKNNVDDQPMLPFEQVSKDIKGGDAAREKADAFCDMTYYLTQFLDGKEINVFLTTLHNLFENIASFLDVMHKQNISYDFTEQYVMFYDSAYIVKKLETVISVSRMKKALDFYNGQALRDAIRVLGISERHVDMDMKEYVDKYLFDDCKDVKHADHNLRNFIVTNVIKSRKFNYLARYSDMATVSKLSKNKEVVKFVLKRVDPKQIERYYRSVCDVRNISAEDEIEKLVDIIYNFNIDELEQVNNAEIGTGHSGRKVASKRSVQERNQARACVSLYLNVLYQIVKNLMNVNSRYSIAFAMTERDMIVEGKGIEAIETFKDDPDAGKKSKKQIAYRTKYIALTEEYLDKGYIKCATERIKENIKKYGGDPKSIDHIPGEYIKKNLEGYCAGSTNTFRNAVAHLALMARVSEYASDIKNVNSYFSLYHYCMQKHILYCARRFNKQGNEKMAAALNDAEIHRSYSKDAVKFLCLPFAYNLPRYKALTVEGLFDWNEYGQDDD

SEQ ID NO: 242 - DNA, 36 bp, Artificial Sequence
  DR
gtactaagaccttactaaatggtaaggttccaaaac

SEQ ID NO: 243 - protein, 954 aa, Artificial Sequence
  PIG-014_GL0226364
MTKPEKKQIKQATLTKRMGLKSTLVFDNKITVTSFANSSNSEKASAHIEKRTDFWGKTIMQDEKMFRTDVEKQQIYIEKEFPDENNKIITQTAMFENPALRNCGKDYIGMKNSVEKVMFGKEFPNDNLHIQIAYNILDIKKIICPYINNVVNIFYNLGRGKLKDDKNDLLGKQIGPKSEEMVEDLLKNSSAYFVYFGDVFKQVKLSKEQQEKSEEEKRRIWQELWNKNFDHNKNIVNSLIKFRQMCFHQNYENSDKEVSSTALFNIEQFLNKEEKASLDEIYTGAIDKVNCDFNKNSSNNLYILEQIYCNDKNLGQRYYDFVVKKSQCNLGLDTKLIRELLIRKLSDEGLDINDSRYDTYRNKIYTVFGFILYYELTKNETFCQEIVAKLRRFGGDEIEKNKIYNEYFLRKEAVYNQIAEKFKQSVCWFKKEKEKKKEFSSKTKIDLRSVQKIEDQNASVFAKMVYLISRFLDGKEINELCTKLLNKFKNINELVETAKRCGETIEFCPEYKMFKNSAKLAEEMRFVQSVSKMKKLTKKEDKSIKPQVIDDALELLGLKIEKYKKDDQGNFVLDDQNHNVWTDEYKSYRKECFTPKNSDSMNDAEKSFVAKGHQKRNFIISNVVLNKRFLYVAKYGSPTACNQMMKNQKIVRMALESISEDQLRKYARRVYDNKEHFQNQTADEIRENLAKKLKNFNIGAELKTVGNLSEKDFRSSKNALKDKSKSLIGLYLTVAYLITKNMIKINTRFSIAFGAYERDMEFLLQQKKEKGKRFDWLALTQKFLSEDKNYYFEHDLRRKEINKISDRDERKKQHRENDKYYDSCMHFSRHSFEYISKNFAEVQSHPDPLKLFIKYRNNVMHLNIIRDLNDYLPDFKRGKAFEKTDTFYDLYCYCLQKMLLSEVDGFSAINENIDKYCTASKDFMNLLNIIFAYNVPRYKNLSNKELFYRLDSEQ

SEQ ID NO: 244 - DNA, 36 bp, Artificial Sequence
  DR
gtacaaaagccctccagtttggacgggttctaagac

SEQ ID NO: 245 - protein, 941 aa, Artificial Sequence
  PIG-018_GL0023397
MAKKLSPRELREQRERERQAKFAKQVQEREAEKAKREKQVSVSDTVGAAAAVQNENGKKSMAKAAGVKSVFAVGDTVYMTSFGRGNDAVLEKKIVDESHESLNKANPAYEITDISSVNYSVEGHRGQSVCATADNPLHHDGGSSVPTDMLCLKPTLERVYFGKTFDDNLHIQLIYNILDIEKILAIYSTNAVYALNNMIADEDDESSDLFQNMTTDYTYDKFRGRSERIVKSFNDFVSNPRLAYYSDAFYEKKGKGSKRRSEKEIYSMLAMLGKLRHWCVHSESGEAEFWLYKLDSLNGEFIDVLNTLYNRSVNEINRGFVDTNKVNIQILQAVCKNMDLISLIKAYYEFLITKKYKNMGFSIKKLREMMLAETAYTSNPDDRLYDKEINSVRNKLYQMTDFIIYLEYRDNKSIIDTLVSKLRSSVTDEAKEAVYREEAANLRGRLLDAVALIAKSLNGVNIKKLQQNTLEIPDSKLENCFIKSAEKVSAFTKLNYLLTRFINGKEINDLLTTLINKFDNIRSFLETMDELGLERTFTENYRFFEDSQKYRDELIELNSFAKSCSFDISAKRIMYRDALDILGIQAELSEDEIGRMIDNILQLDANGERISKNQRENGLRNFIASNVIDSNRFKYLVRYGNPKKIRETAKCPPAVKFVLDGIPDSQIERYYNSCFPEDTAICSADKKRRELAEMISNISFDWFKDAGNVQRVNAEDKSRNAEIKRKNQAIIRLYLTVMYLMLKNLVNVNSRYVIGFHCVERDAKLYKLSGLTIEGNTDKNRTLLTATILGITSADRAPSGEIVADCDLGRAETAANRHLRKKRWYVQIFNNLKQADRNVINEFRNSVCHLNAIRNINTNIEGIGFVKNYFALYHYLIQRHISSKRISFNSFSAEYISNLEKYHTPSEYFIKAYCTPFAYNLVRYKNLTIDGLFDRNAPSEK

SEQ ID NO: 246 - DNA, 36 bp, Artificial Sequence
  DR
gaactacacccctgttaaattgcaggggtctaaaac

SEQ ID NO: 247 - protein, 948 aa, Artificial Sequence
  PIG-025_GL0099734
MAKKMNAKEQRAAIQAEKNKKIQMANAAREKQAEEARLKAEAERIEKEENKKREAELKRFKLDQETRGKLPKNERKSLAKAAGLKSTFAVGTDLYMTSFGKGNDAIVEKKISNKQVTQINTEKENFTVDTDGITDTIVPVQSKRIACLNTQADNPLYRKDSENQVQPDKLLLKDTLEKVYFGKTFNDTLHIQLIYNILDIQKILTVYSVNTVYTLNNLFGKEISERGDFIGALSFQQTYDDYTSDSKNKEIFEDFYSKRSLGYYGHIFFKDKKKRSKREIYDILALIATIRQWCIHSEEDKKTWIYNAENVLDSEYLDILDDVYGGLVEKINKNFIKDNKVNLILLSDILDMKSKDDFEELIRQYYRFIITKEQKLLGFSITKIREAMLEDTVFKTDKKYDSIRSKLYKLIDFMMFYKYTTVDSEKEHADSIVEKLRATLSGESKEEIYKAEANRIWNLYEDIIMNKIEPALDEGVISGLKKNKSYDNMSIEGIVAEETANVSYFSKIIYLLAQFIDGKEVNDLTTTLINKFDNIRSFIDTANQIGLECNLLDEYQFFNTSDTVKKELHVIKNLTGMGYYDVSIKHQMYKDAIDILGLHDNLSDEEINQLIDTNILFIGADGKPVKMAKGKRGFRNFIISNVLKSSRFRYLVKYCNPKKIRKIANNEKIVKFVLGRITETQIERYYYSCNPELKRAAYPGREAAIDDLTKIIINMKFDDFKNVKQSANVEDSSKEAQEKMKYQTIISLYLTVCYHLVKNLVNINARYAMAFHSLERDARLYGIYGSEKDYVEKLKKEQAVLVEKLLSDGPETAGNLHLRSKKWNRLMRVNLENYSAAASQNFRNAVAHLNPIRNADVLIEGIENITSYFDIYHYIVQRSVLNRTNKTPKMKEYEELINKYHTYNKDFVKALCAPFGYNVVRFKALTIYEMFDRNYPEEKRAEEARKSC

SEQ ID NO: 248 - DNA, 36 bp, Artificial Sequence
  DR
taatatgccctatatcaatttataggggttcagaac

SEQ ID NO: 249 - protein, 894 aa, Artificial Sequence
  PIG-028_GL0185479
MSESDKIKIKSKKTRTKRAGLKSSFVSEGKGLMTAFGKGNNAVIEKRISGDLIENVSNKPRFSVEFGNKEYIINDKKLGIVSDDPRESQKPVGEDGIHCKRALEERYFGKTFNDNIHIQLIYSILDLEKILAVHSNNIVYTFDNLRRKETDEYDDFIGYMSTVNSYEEFISPEKLLPGKEQSVYDNINRSQETFLEYRKNPRLGYFGKVFYEKSTDAKDKNKKKMRLISEKEMYYIFALLGGLRQFCTHDKNRARNWLYSLDTMLNDDAKAVLDKYYVSTVSSLNKHFVENSAKKDFSIIFNALNITDIELKKNIAKEYYEFVCRKNFKNIGFSIKKLREYLLEKPEFRNLKDDKYNSVRSKLYRLIDFIIYLNYKDAKFKNDNDEKIERFVSKLRKCPDEASKETVYQTEADIIKKSISGSINSIKRDMMLVKSKYGKLELDTQTVNQLKRAVDDISINTKGDYFTKLMYLISLLIDGKEINDLLTTLIHQFENIASFIDVMKKENIECEFTEKFAFFKNSEIIAHELRTVNSFARMTGFMENDESTKFIMFREAADILGTSYTDDELTDHLNLKKTRLIARSKADMGLRNFIISNVIKSSRFKYLIRYSNPKKVKAIAENKKLVSFVLDKIPDTQIIRYCNTCGFKVGKRQENINTLAEAITYFSFSNFEKVKQSANVENDTPDAIDKAQKQGLISLYLTVLYLFIKNMVYVNSRYVLAFHCLERDSQLLKITSGYNNLSYNNLTNHFIEKEYLNSHARNYLRVNISNSDEWSIVKFRNGVAHLNSVRNIDTSIKGLREFKSYFEIYAYTVQKSIKNYYDAESPVQINPKTIEYMESVDKYGSYTKDFVKALNTPFGYCLARYKNLSIEPLFDRNTVYNKKDVKEEFAVNSK

SEQ ID NO: 250 - DNA, 36 bp, Artificial Sequence
  DR
gaactatagccctccgatttcggagggttctgaaac

SEQ ID NO: 251 - protein, 980 aa, Artificial Sequence
  Ga0224422_10645759
MDKYKLLRNQKFDYVIKLDNIDNIRPILCKEIVNKILKKLKLDFFFSTKEKEIHFTADDIITKKYKKIELVGDDKEVFPIYVRLREVPLKGKAKRLGLKSIFVEDNKLILTTIGKKDDVLIEKEILNNSKNEVISHINPENYAVQEVNYKNISLANDKLKADIDNPSHSKVEETISIKKDYLERKDVIEKKFFNNTFNDNIHIQLAYNIMDINKIFNIYSNEVVFTMENLAHSDDAKDFIGGIDYKKDVIQNAKFNDYFASIFNSLRYFSQAFPNKTFDKIKIDGEKDYNREEIKKNTKIILRILSMFRQFSIHGYTDLFDMEKDPKIRDLLDYFTARYDEVYNNLIRNFIKTSKTNIAIVFEALNLPINDNGLKKEILNDYFDFSITKSYVNMGFNFKRLKEVLISKLGLNVSDSNKQATYNVINYLIYRHLKDNPIVDKYVKCLVASEGDLDKIAIYDAFADEIKLPLKNIITQELVDNQKRNQKYKYFNIDGSWLNTNFNNIDPFCKAIYFLTIFLDTKEINMLVTSIVNKLRNINGLVKVLNNKSDLIYDYRIFDKGNAQKIADQLSVVLSIARMQKNFNKKFKSDNKNSANKPSSDMIYDAYCLFGYKESKETFDEELEADTSKPSKGIAKFQNKITSAIVNSNKFRFIIKYANPRNCYSIMKNTRVVSFVLKEIPQSQIDKYIIKKEKYNSLNYDAKINALAKELADVSIYGMRKAYNIRAKVEANNLELPKLFMTIIYQVIKSLVRINTYYNIAFSCLERDKKLFNVPDDYCDYSDLMLLDAFVYGTNEFEVSKDGKCECITIDVPLNKYERKVDGKIISVQGTKLGSSKYSWLKDDIDVFKEIFYMNNKPTEIESCSVIYRACYRNTIAHLNAISNMTSYLASFVGRNNRMNSYFELYQYIIQMNFINKYKDNYSNEFIDKQSEILKKYKTYSKDLLHILNLPLAYNMARYKNLTIEDIFYDKFINYIKKSE

SEQ ID NO: 252 - DNA, 36 bp, Artificial Sequence
  DR
ggacaataacctgcgaattttggcaggttctatgac

SEQ ID NO: 253 - protein, 996 aa, Artificial Sequence
  ODAI chimera
MLKKCSVCGKKFETNYQGGKPVCRNCRSNKSKPVNPKSSRKPESIDKAIEILTEKLISDCKKNDCASECGKGRRKSKAKAAGLKSALDLGNGQALITSFGKGNEAVPEKRVEGDKIISLREGEAFALAKEPVNHKLVLKSGRIKAEGGPVEFDGPQKNSSMSAVRLDEYNNQIERKFFRGNKVLQDNIRIQIAHNIMDIEKILAVHINNIVYSVNNLFRVQGNEGDDFLGYRGLDKNYSDFCKNKPEDKERFFNFIGKGDGKVTNPRLSYYGAAFAEKVQPTLKYREAEDIYYIICMLGEARQMFAHGNDDRTKTFLYNIVGYRNGTEINSKFTAVLDGIYSKKVEELNGNFIKNSKKDLTILFSAFGCQDEASKKKLIEKYYDFIVKKTNKNMGFSVTKLREKIIEGYRFRGNPVTGTDYDSVRHKLYRTFDFIICSYYDDHAKEKDTLVSSLRASLNDTKKENLYAGEAKTIAESIKDRMDTVCRMYNKGEGIKHITVDRFIAGAGAGKLIDKCSISTECDYFCKFIYLMTLFIDGKEINDLLTTLINKFDNIDSPSVDKAVNNQNRVEFGDKYDMFNKAGEICESLRSINSFARMESPAPAAKRTMFVDAIRMFGFADVSDNDAEKFYKENIEPFIYDRNGDIEDEWKKGKLVHKKDEKKKGVYNFIATNVIESNRFQYLVRYANTEKIAALARNETIVRFVIKKLPAAQIVRYYIACNRIRENINSNVLTSDDMAESLVKLVTGMDFGKIKGVRNDDRSGDKEMKKAIVTLYLTILYHLTKNLVYVNSRYFMAFHCLERDMNLFGEGQKQALRNTGDYPADNADLRRRDIKYCVLTKAHIKQEEVKSRRNDTDSKSQQKAKSRRRRWCLLLKEDIDKLNGCESLRILYRNAVAHLNIPRNAIDYIGGIKKADSYFAIYHYMMQQYLSKKHGLPEGLGCTHGVYCKDLVKALNAPFGYNLPRFKNLSVEALFDMNEEPAPEGKERSKNADGCN

SEQ ID NO: 254 - DNA, 36 bp, Artificial Sequence; identical to SEQ ID NO: 159
  DR

SEQ ID NO: 255 - protein, 6 aa, Artificial Sequence
  HEPN motif
  misc_feature (2)..(5): Xaa can be any naturally occurring amino acid
RXXXXH

SEQ ID NO: 256 - protein, 11 aa, Artificial Sequence
  N-terminal NLS
SPKKKRKVEAS

SEQ ID NO: 257 - DNA, 33 bp, Artificial Sequence
  N-terminal NLS
agccccaagaagaagagaaaggtggaggccagc

SEQ ID NO: 258 - protein, 11 aa, Artificial Sequence
  C-terminal NLS
GPKKKRKVAAA

SEQ ID NO: 259 - DNA, 20 bp, Artificial Sequence
  dCas9 target
uuaucgucuguuuguggaug

SEQ ID NO: 260 - DNA, 33 bp, Artificial Sequence
  C-terminal NLS
ggacctaagaaaaagaggaaggtggcggccgct

SEQ ID NO: 261 - DNA, 271 bp, Artificial Sequence
  Artificial Eubacterium siraeum nCas1 array targeting ccdB
gaacuacacccgugcaaaaaugcaggggucuaaaacuaacggcucucucuuuuauagguguaaaccgaacuacacccgugcaaaaaugcaggggucuaaaaccuuuaucugacagcagacgugcacuggccagaacuacacccgugcaaaaaugcaggggucuaaaaccaucaugcgccagcuuucauccccgauauggaacuacacccgugcaaaaaugcaggggucuaaaacuaauggcguuuuugaugucauuuucgcgguccgcuga

SEQ ID NO: 262 - DNA, 36 bp, Artificial Sequence
  Artificial Eubacterium siraeum nCas1 array targeting ccdB - full 36 nt direct repeat
gaacuacacccgugcaaaaaugcaggggucuaaaac

SEQ ID NO: 263 - DNA, 30 bp, Artificial Sequence
  Artificial Eubacterium siraeum nCas1 array targeting ccdB - spacer 1
uaacggcucucucuuuuauagguguaaacc

SEQ ID NO: 264 - DNA, 30 bp, Artificial Sequence
  Artificial Eubacterium siraeum nCas1 array targeting ccdB - spacer 2
cuuuaucugacagcagacgugcacuggcca

SEQ ID NO: 265 - DNA, 30 bp, Artificial Sequence
  Artificial Eubacterium siraeum nCas1 array targeting ccdB - spacer 3
caucaugcgccagcuuucauccccgauaug

SEQ ID NO: 266 - DNA, 37 bp, Artificial Sequence
  Artificial Eubacterium siraeum nCas1 array targeting ccdB - spacer 4
uaauggcguuuuugaugucauuuucgcgguccgcuga

SEQ ID NO: 267 - DNA, 268 bp, Artificial Sequence
  Artificial uncultured Ruminoccus sp. nCas1 array targeting ccdB
cuacuacacuggugcaaauuugcacuagucuaaaacuaacggcucucucuuuuauagguguaaacccuacuacacuggugcaaauuugcacuagucuaaaaccuuuaucugacagcagacgugcacuggccacuacuacacuggugcaaauuugcacuagucuaaaaccaucaugcgccagcuuucauccccgauaugcuacuacacuggugcaaauuugcacuagucuaaaacuaauggcguuuuugaugucauuuucgcgguccgc

SEQ ID NO: 268 - DNA, 36 bp, Artificial Sequence
  Artificial uncultured Ruminoccus sp. nCas1 array targeting ccdB - full 36 nt direct repeat
cuacuacacuggugcaaauuugcacuagucuaaaac

SEQ ID NO: 269 - DNA, 30 bp, Artificial Sequence; identical to SEQ ID NO: 263
  Artificial uncultured Ruminoccus sp. nCas1 array targeting ccdB - spacer 1

SEQ ID NO: 270 - DNA, 30 bp, Artificial Sequence; identical to SEQ ID NO: 264
  Arificial uncultured Ruminoccus sp. nCas1 array targeting ccdB - spacer 2

SEQ ID NO: 271 - DNA, 30 bp, Artificial Sequence; identical to SEQ ID NO: 265
  Artificial uncultured Ruminoccus sp. nCas1 array targeting ccdB - spacer 3

SEQ ID NO: 272 - DNA, 37 bp, Artificial Sequence; identical to SEQ ID NO: 266
  Artificial uncultured Ruminoccus sp. nCas1 array targeting ccdB - spacer 4

SEQ ID NO: 273 - DNA, 303 bp, Artificial Sequence
  Target RNA (ccdB sequence)
augcaguuuaagguuuacaccuauaaaagagagagccguuaucgucuguuuguggauguacagagugauauuauugacacgcccgggcgacggauggugaucccccuggccagugcacgucugcugucagauaaagucucccgugaacuuuacccgguggugcauaucggggaugaaagcuggcgcaugaugaccaccgauauggccagugugccggucuccguuaucggggaagaaguggcugaucucagccaccgcgaaaaugacaucaaaaacgccauuaaccugauguuuuggggaaua

SEQ ID NO: 274 - DNA, 30 bp, Artificial Sequence
  Target RNA (ccdB sequence) - spacer 1
gguuuacaccuauaaaagagagagccguua

SEQ ID NO: 275 - DNA, 30 bp, Artificial Sequence
  Target RNA (ccdB sequence) - spacer 2
uggccagugcacgucugcugucagauaaag

SEQ ID NO: 276 - DNA, 30 bp, Artificial Sequence
  Target RNA (ccdB sequence) - spacer 3
cauaucggggaugaaagcuggcgcaugaug

SEQ ID NO: 277 - DNA, 30 bp, Artificial Sequence
  Target RNA (ccdB sequence)
accgcgaaaaugacaucaaaaacgccauua

1. A method of targeting one or more target RNA molecules, comprising:
contacting one or more target RNA molecules with a non-naturally occurring or engineered clustered regularly interspaced short palindromic repeats (CRISPR)-associated (Cas) system comprising:
at least one Cas13d protein comprising at least 95% sequence identity to SEQ ID NO: 189, or a nucleic acid molecule encoding the at least one Cas13d protein; and
at least one CRISPR-Cas system guide RNA (gRNA) comprising one or more direct repeat (DR) sequences and one or more spacer sequences, which hybridizes with the one or more target RNA molecules, or at least one nucleic acid molecule encoding the gRNA,
whereby the Cas13d protein forms a complex with the gRNA, wherein the gRNA directs the complex to the one or more target RNA molecules and targets the one or more target RNA molecules.

2. A CRISPR-Cas system-mediated RNA targeting method, comprising:
contacting one or more target RNA molecules with a non-naturally occurring or engineered clustered regularly interspaced short palindromic repeats (CRISPR)-CRISPR associated (Cas) system comprising:
at least one Cas13d protein comprising at least 95% sequence identity to SEQ ID NO: 189, or a nucleic acid molecule encoding the at least one Cas13d protein; and
at least one CRISPR-Cas system gRNA comprising one or more direct repeat (DR) sequences and one or more spacer sequences, which hybridizes with the one or more target RNA molecules, or at least one nucleic acid molecule encoding the gRNA,
whereby the Cas13d protein forms a complex with the gRNA, wherein the gRNA directs the complex to the one or more target RNA molecules and targets the one or more target RNA molecules.

3. The method of claim 1, wherein contacting the one or more target RNA molecules with the non-naturally occurring or engineered CRISPR-Cas system comprises introducing into a cell containing the one or more target RNA molecules the non-naturally occurring or engineered CRISPR-Cas system.

4. The method of claim 1, wherein the one or more target RNA molecules or the cell are contacted with a complex comprising the at least one Cas13d protein and the at least one CRISPR-Cas system gRNA.

5. The method of claim 1, wherein the least one Cas13d protein:
comprises at least 96% sequence identity to SEQ ID NO: 189;
optionally further comprises one or more subcellular localization signals, effector domains, purification tags, affinity tags, or
combinations thereof.

6. (canceled)

7. The method of claim 1, wherein
the one or more DR sequences comprises at least 95% sequence identity to SEQ ID NO: 190.

8. The method of claim 1, wherein targeting one or more target RNA molecules comprises one or more of cutting the one or more target RNA molecules, nicking the one or more target RNA molecules, activating the one or more target RNA molecules, deactivating the one or more target RNA molecules, visualizing or detecting the one or more target RNA molecules, labeling the one or more target RNA molecules, binding the one or more target RNA molecules, enriching the one or more target RNA molecules, depleting the one or more target RNA molecules, editing the one or more target RNA molecules, trafficking the one or more target RNA molecules, splicing or perturbing the splicing of the one or more target RNA molecules, and masking the one or more target RNA molecules.

9.-20. (canceled)

21. The method of claim 1, wherein the least one Cas13d protein comprises at least 96% sequence identity to SEQ ID NO: 189.

22. The method of claim 1, wherein the least one Cas13d protein comprises at least 97% sequence identity to SEQ ID NO: 189.

23. The method of claim 1, wherein the least one Cas13d protein comprises at least 98% sequence identity to SEQ ID NO: 189.

24. The method of claim 1, wherein the least one Cas13d protein comprises at least 99% sequence identity to SEQ ID NO: 189.

25. The method of claim 1, wherein the least one Cas13d protein comprises SEQ ID NO: 189.

26. The method of claim 1, wherein the least one Cas13d protein further comprises one or more subcellular localization signals, effector domains, purification tags, affinity tags.

27. The method of claim 1, wherein the gRNA comprises one or more DR sequences comprising at least 96% sequence identity to SEQ ID NO: 190.

28. The method of claim 1, wherein the gRNA comprises one or more DR sequences comprising at least 97% sequence identity to SEQ ID NO: 190.

29. The method of claim 1, wherein the gRNA comprises one or more DR sequences comprising at least 98% sequence identity to SEQ ID NO: 190.

30. The method of claim 1, wherein the gRNA comprises one or more DR sequences comprising at least 99% sequence identity to SEQ ID NO: 190.

31. The method of claim 1, wherein the gRNA comprises one or more DR sequences comprises SEQ ID NO: 190.

32. The method of claim 1, wherein the gRNA comprises a nucleic acid aptamer.

33. The method of claim 7, wherein the a nucleic acid aptamer inserted into the gRNA comprises MS2, PP7, or Qβ.

34. The method of claim 1, wherein the gRNA comprises modified nucleotides.

35. The method of claim 3, wherein the cell is a eukaryotic cell.

36. The method of claim 35, wherein the eukaryotic cell is a mammalian cell.

37. The method of claim 35, wherein the eukaryotic cell is a plant cell.

38. The method of claim 3, wherein the cell is a bacterial cell.
